United States Patent Application Publication US 2024/0254512 A1 - sequence listing, part 3

SEQ ID NO: 4919 - protein, 664 aa, Gammatorquevirus sp.
MPFWWKRRRKPWFGRWRWRRRYNNKYKRRRRRRRIPRRRNRRATRRRRRRRKVRRKRQQLPLKQWQPDSIVKCKIKGQGLMVLGAECRQMRCYTDVKTETVRPKTPSGGGFGYEVYTLNYLYSEYKYHYNIWTKSNLYKELCRYCGVRIRFYRHQDIDFIIQYDTMPPYNITKFSYISCHPLQMLQHRQHKVLLSKRSKPNGKLYKSIFIKPPKLMDNKWFIMDSFSKHPLCAIKAVAADFAYSYLQCCNENQQLGIYTLDPLFYMNGNWGDASKIYYPYATIPKPSTFFIKYINGTTKKLVIKPNNYYSSISWNEGYFQSDLLKTFKMYTDETYATESQAAIPINMAIYNPNLDKGEGNQIWLSSIHNASYSPPSSDPQTLIQNIPLWLGLHGYFDYILKVKGTHDFLETHIVCLKSPAIKLYPQVGSGNIIIPIDKDFIDGLAFYSQPPTYTDKKKWYPTCLTQQRILNAIVETGPFVPKLANTTKSTWELKYDYCFYFKWGGQQVTDPDVLDPSKQNLPDSANTIQQTVEINNPEKNKAESFIYQWDYRRGIIKETALKRMYDNLSTQTSVQAATEKEEPPHKKRKLPTLKTQEKKNKKIHNCLQQLFKENTSQESEVQTIHELIQQQQHKQQQLKENLLQLILEMRKKQQMLQLQTGLFY

SEQ ID NO: 4920 - DNA, 2518 bp, Gammatorquevirus sp.
gggggtcatttttataatgtaaccaccgaggtctaggggcaattcgggctagggcagtctagcggaacgggcaacaaacttaaaacaatatttcttttacagatgtcccgcttctacactggcactaaatacaatggagccacactaaatcaaatgtggatgtctatgatagcagattcacatgatattcactgtgattgtaaaaaaccttttgctcacctacttgacagcatatttccagaaggtcacacagatagaaacaaaacaatagcacatattattcaaagagattatcaagaatgcctttctggtggagaagaagaagaaaaacctggtataccccttggaggcagcgccgctaccgccgccgcagatacaggcgtaaacgtagaagaccatttagcagaagacgcagacgaaatagaaaagctactcgccgccgcagaagaaaactacctaaggtaagaagaaagaaaaaatttttaaaacttgtacaatggcaaccagacagaataagaaaatgtactattaaagggagaggaactctagtaatgggagctcatggcagacaaatgatctgttttaccaatgttaaagacagactaacacctagcagagcacccgcgggaggtggatttggcatagaaagattttccttagggtacttatatgaagaatggaaagctagaaacaatatatggactgcaacaaatgaaaacacagacctagcaagatacctaggctgtgaatttaccttttacagacatcaagatacagactttataattaaatatgaaagacaaggtccttttaatttacaaaaatactcatacatgtatatgcagccacaagaactactactaggaaaacataaaaaaatactactaagtaaacaaacaaatccaaatggaaagttaaaacttagactaaaaatagggccaccaaaactactaacaaataaatggttattacaatcagaactagcaaaacaagacttagtacaaatatcaggagcagcagctagctttagataccccacaataggatgctgcaatgaaaacagaattttaaacctatactcaataaacattgaattttacaaagatgcacactggatgcaagcatactctgcccaggcatactataaaccatacgctacaattccttcagacttaaattttcactataaaacacaagcaggaggagaaggcactgttaaaggaccacaatctaaagacaaagcattgaccttagaatcaggatggtttcaatcaaaaatattaggagcttataaagtaactaaggcagagtcatccacacaatatggcgaactcccaatggtcctacttagatacaatccagcagctgaccaaggaccaggtaacttagtaactatagtagatttagtagcagggcaatggcaaggaccataccctcctgaatatacaatacaagatgtaccactatggctagcactaaatggatatgttaactacataatacaaaaatctggagacaaaggcatcatgaaacataaaattgtttgtattaaaagcccagcactatacagactaccaacagttagtgctcaaaaaatatttccaataataggatccaaatttgtaaatgcaaagccaccatatgaccaaccactaacacccgacatgtctagaaattggtaccctacatatgaacaccaacaagaacccttaaatgacattgtttgctgtggacctttagtaccaaaattttataatcaaactaacagtacatgggaattacaatacttttatcgtttttactttaagtggggaggccctgaaattggagacccaacagttgatgatccaaaaaccaaaggagaaaaaaccactgactatacaatgccccgcacaatacaaatatttaacccactcaaaaataaaacagaatccattctacacccctgggacttcagaaggggcattgttacaaaaagagctcttgaaagaatgtgccaaaacctcgaaactgattcaaatttctacccagatggagaaacaccaaagaaaaagaaaaagacaacctgcgagctcagaaacccagaggaagaaatcaaagaagtgcagaactgtgtcctctcactctgccaaacagaaacatcggaggaagaggaccccaacaacctccagcagctcatcctcaagcaaaagctcaagcagcagcagctcaagcacaacatcctagtactactaacagacctgaaaaccaagcaaaactctttgagactacaaacaggaaatttacagtagaagcatttaaacctggctttgaacttcaaacagaaaaagagcttgctattgctttttgcagaccaccaagacattataaaaatgaccccccattttatccatggctaccacctgcaccccttgttaactttaaccttaactacaaatgctaggccaacaatgtacacttagtaaagcatgtttaataaagtttacaaggggtgcaggtggtagccatggataaaatg

SEQ ID NO: 4921 - protein, 663 aa, Gammatorquevirus sp.
MPFWWRRRRKTWYTPWRQRRYRRRRYRRKRRRPFSRRRRRNRKATRRRRRKLPKVRRKKKFLKLVQWQPDRIRKCTIKGRGTLVMGAHGRQMICFTNVKDRLTPSRAPAGGGFGIERFSLGYLYEEWKARNNIWTATNENTDLARYLGCEFTFYRHQDTDFIIKYERQGPFNLQKYSYMYMQPQELLLGKHKKILLSKQTNPNGKLKLRLKIGPPKLLTNKWLLQSELAKQDLVQISGAAASFRYPTIGCCNENRILNLYSINIEFYKDAHWMQAYSAQAYYKPYATIPSDLNFHYKTQAGGEGTVKGPQSKDKALTLESGWFQSKILGAYKVTKAESSTQYGELPMVLLRYNPAADQGPGNLVTIVDLVAGQWQGPYPPEYTIQDVPLWLALNGYVNYIIQKSGDKGIMKHKIVCIKSPALYRLPTVSAQKIFPIIGSKFVNAKPPYDQPLTPDMSRNWYPTYEHQQEPLNDIVCCGPLVPKFYNQTNSTWELQYFYRFYFKWGGPEIGDPTVDDPKTKGEKTTDYTMPRTIQIFNPLKNKTESILHPWDFRRGIVTKRALERMCQNLETDSNFYPDGETPKKKKKTTCELRNPEEEIKEVQNCVLSLCQTETSEEEDPNNLQQLILKQKLKQQQLKHNILVLLTDLKTKQNSLRLQTGNLQ

SEQ ID NO: 4922 - protein, 120 aa, Gammatorquevirus sp.; identical to SEQ ID NO: 3562

SEQ ID NO: 4923 - protein, 125 aa, Gammatorquevirus sp.; identical to SEQ ID NO: 3563

SEQ ID NO: 4924 - DNA, 2518 bp, Gammatorquevirus sp.
cagttaaaaacaaaagtggttctactacaacacttggggcaattcgggctagggcagtctagcggaacgggcaagaaacttaaaatatatatttttttacagatgtctaccctgtttaaacctacaaaatacaatggatgtaccaaaaatcaactatggatgtcaataataagtgattctcatgatattcactgtggatgtgaagtgccttttagtcacctacttgacagcatatttccagaaggacacagtgacagacacaaaacaatagaagaaattattaaaagagatactcaaccatgccattttggtggtacagaagaaaaaagccatggttttacaacaatcaaagaagaagatataaaaagagatggagaagaaaaccaagaagaagaccttatagaagacgccgcgttacaagaactaatcgccgcaggagaagacgccataggaaggtaaggaaaaaaagaaaaaccttacctgttagacaatggcagccagactgcattagaaactgtaaaataagaggcttctcagccctagtagtaggagcagaaggaactcaaatgtactgttatacagaagaaaaatttaactatgttccaccaaaagttccatggggagggggaataggagtagaaaactatacacttaaatacctatatgaagaattaattttccataacaatttttggacaacttcaaatgttatgctagacctatgtagatacataagatgtaaaataatacttttcagacactcaaaccaagactttgtaatttcatatgatagacaaccaccttttaaattaacaaagtggacatatcctagctgtcacccacatcagctactactacaaaaacacaagaaaatactacttagccttaaatcaaaaccaaatggcaaatactataaaaagcttatcattaaaccacctaaacaaatgctcacaaaatggttttttacaaaaagcttttgtaatgagtcactattcctactaaaaggtgcggcagcaaactttagaaactcatacttaagtgcatccaatgaaaacaggctagttaatatcatgtcacttaacacacagttttatcaacactctaactgggcacaaactagatcggctgaacagccatacttaccatataacaatgccccaaaaaacatgacttacacagttaaaaacaaaagtggttctactacaacacttactatgaatataacaacttatcagagcagcatagaccatgacactggctggtttaaatccagctttttacaagcatatgaaattcctatacattcaacacacgcagcaaccatacccatgttaatagccagatacaacccaaacaaagacacaggagagggcaacaaaatatttataaaatctgttctatcagatggctgggtaccaccatccactgacaaacaactagaaatagacaatgtcccactgtggctaggcttacttggatttttatcatatgttaaagaaaccaaaaatgtagactacttaaaatcctcagtagtagttcttaaaagcactgcaatacactgctccagtcaaataggaagctgtgaactatactgtcccatagacacagaatacatactaggcaaaaaaccatatgaacaagttattactcaaacagaacaaaagttgtggtacccaacaacacaatggcaactaaaaacattaaatgcaatagtagaatcaggaccatacataccaaagctatcagaagaaaaagaaagtacatgggaactaaaatatatgtacaattttttctttaagtggggaggaccacacactccagacaaagaaattacaaatccagaaaactttaacacctatgatgtacccgatactatcacaaggtcaatacaaattaccaacccagaaaaaaacacaacagaaacaatactacacccctgggacttcagaaggggcattgttaaagaatcagctcttaaaagaatgtgcgaccacctcgacactgatacagaatttcaattctctacagaagaagctccaaagaaaaagagaaagatccagggagcagcactgcaacacccccagaaagaaacagaagaaatctaccactgtctccatggtctctgcgaaaaaagttcattcccacaagaagaagaaaagacactcgaagcactcatccagcagcagcagcagcagcaggagctactcaagtacaacatcctccagctcctgatggatctaagagaaagacagaaacagcttcaactacacacaggaatgttacattaacaagatttaaagtaggctttgaacaagacacagaaaaagaaatgtctatagcattttgcagaccccctagaacttataaagaagaccctcccttctatccctggcttcccaagcttgaaccccttgtaaactttcacctaaactttaaaggctaggccaacactattcacttagacaagcatgtttatataagcacaaccctaataaaaatcaaaaaaacatgacttaca

SEQ ID NO: 4925 - protein, 662 aa, Gammatorquevirus sp.
MPFWWYRRKKPWFYNNQRRRYKKRWRRKPRRRPYRRRRVTRTNRRRRRRHRKVRKKRKTLPVRQWQPDCIRNCKIRGFSALVVGAEGTQMYCYTEEKFNYVPPKVPWGGGIGVENYTLKYLYEELIFHNNFWTTSNVMLDLCRYIRCKIILFRHSNQDFVISYDRQPPFKLTKWTYPSCHPHQLLLQKHKKILLSLKSKPNGKYYKKLIIKPPKQMLTKWFFTKSFCNESLFLLKGAAANFRNSYLSASNENRLVNIMSLNTQFYQHSNWAQTRSAEQPYLPYNNAPKNMTYTVKNKSGSTTTLTMNITTYQSSIDHDTGWFKSSFLQAYEIPIHSTHAATIPMLIARYNPNKDTGEGNKIFIKSVLSDGWVPPSTDKQLEIDNVPLWLGLLGFLSYVKETKNVDYLKSSVVVLKSTAIHCSSQIGSCELYCPIDTEYILGKKPYEQVITQTEQKLWYPTTQWQLKTLNAIVESGPYIPKLSEEKESTWELKYMYNFFFKWGGPHTPDKEITNPENFNTYDVPDTITRSIQITNPEKNTTETILHPWDFRRGIVKESALKRMCDHLDTDTEFQFSTEEAPKKKRKIQGAALQHPQKETEEIYHCLHGLCEKSSFPQEEEKTLEALIQQQQQQQELLKYNILQLLMDLRERQKQLQLHTGMLH

SEQ ID NO: 4926 - protein, 141 aa, Gammatorquevirus sp.
LGQFGLGQSSGTGKKLKIYIFLQMSTLFKPTKYNGCTKNQLWMSIISDSHDIHCGCEVPFSHLLDSIFPEGHSDRHKTIEEIIKRDTQPCHFGGTEEKSHGFTTIKEEDIKRDGEENQEEDLIEDAALQELIAAGEDAIGR

SEQ ID NO: 4927 - protein, 111 aa, Gammatorquevirus sp.
LSPWSLRKKFIPTRRRKDTRSTHPAAAAAAGATQVQHPPAPDGSKRKTETASTTHRNVTLTRFKVGFEQDTEKEMSIAFCRPPRTYKEDPPFYPWLPKLEPLVNFHLNFKG

SEQ ID NO: 4928 - DNA, 2518 bp, Gammatorquevirus sp.
caattcgggctagggcagtctagcggaacgggcaagaaacttaaaactatgcttactttccagatgcaaaacatttcctttaaagacttctacaaaccaacaccctacaacgaagaaactaaaaaccaaatatggatgtcacaaattgctgattctcatgacaatatttgtgactgcgagtgtccttttgctcatttgcttgcttccatttttcctcctggtcatcacgatcgtaatctctcaattaatcaaatattgtgccgagactacacacaaaaatgcctttctggtggaaaagaagacaaaaaaggtggtatggcagacaatttagatggcgaagaagaagaacaaaattctacagaccaaaaagaaaatataaaagaagaagacacagacgccctgttcgccgccgccgtagaaagctacgaaaggtaagaagaaaaagaaaatctcttgttgttaaacaatggcaacctgaatctataactaaatgtaaaataattggcaactctgctattgttgttggagcagaaggcaaacaaatgtggtgttatacagtcaacaaaatgattggtgtacctccaaaaaccccctatggagggggattcggagttgagcaatatactcttaaatacctatatgaagaatacacattccacaataacatttggacaaaatccaatgttctaaaagacctatgcagatttttatactgcaaagttgttttttacagagacaacaaaacagactttatagtagcatatgactctcaaccaccatttcaactaactaaattcacatacccaggaactcatccacaccagatgctactacaaaaaaggcataagctaatattatctcaaatgacaaaacctactggtaaactaacaaagaaatttaacataaaaccacctaaacaaatgctatctaaatggtttttttcaaaacaatttagcaaataccccttacttcaattaaaagctgcagcacttgatttaagacattccttcttaggctgttgtaatgaaaatccacaagtattttttcattacattaaccatggcttttacagaaacacaaactggggacaaacatcatccactgcttacattccctatgaaggcacagaatttaccattcccacaaccatatattacaaatataaaaacactgttcaaccattaaacaaaccacacaattatgatgaaagtgtatcaattacaaaaggatatttcaaaccagaatttttgcaaacacaatgctggagtaatagcaactcatcatcaatggtatgcatggctaataaccctattgcctatgctatttataatcctactaaagacagtggatatggcaattccctatacttagtaagtgttctttctaattcctgggaccaaccaccaaaagacaatgccattttaatacaaggcatgcctatttggcttgcaatttttggatacctagactatgcaagacaaataaaagcagacaaaacatggctagaatcccatgtagttgttatgaaaagtccagctatttttacctatcctaatgtaggagcagacaaatggtattgtcctatatcaagatcatttatagatggactaggtccttttggacagccacctacatcaacagaaaaaataaaatggtatccacaaataagacaccaatatgaaatcttaaatgcctttgctgaatcaggaccctttgtcccaaaatattcaaaccaaaatgaaagtaactgggaactaaaatacaaatatattttttattttaagtggggaggcccttacctcaatgaaccagaaattgcaaatccaaccacacaagagcaatatgatgtgcccgatactttcaaagaaacagtacaaattgaaaatccagaaagacttgaccccagatctatcatccatgattgggactggagaaggggatttattaaagaaagatctcttaaaagaatgtcaacttacctctcaactccttcagatatccaagactctcaagaaccaccaaaaaagaaagagagacttggaccccaactcacagtcccacaaaagaaagaagaagaaacactcagctgtctcctcagtctctgcaaagaaaatatctaccaagaagcggagacagaagaggacctcaagcagctcatcatgcagcagcagcagcagcagctccagctcaagcgagacatcctccaactaatattcaaaatgaaacaagaccaacaaatgctacaactacacacaggcctgttaccctaacaagatttaaagaaggctttgaaagacaaacagaaaatgaattagctatggcatttagaagaccacctagactgtttaaagaagacaaaccattttatccatggcttcctagtcctgtaccccgtgtaaactttcaccttaattacaaattctaggcctacaatgttcacttagtggtgtatgtttaataaagtttgccccccaaaaaaataaaaaaaaaaaaaaaaataaaaaattgcaaaaattcg

SEQ ID NO: 4929 - protein, 663 aa, Gammatorquevirus sp.; identical to SEQ ID NO: 4826

SEQ ID NO: 4930 - protein, 128 aa, Gammatorquevirus sp.; identical to SEQ ID NO: 4827

SEQ ID NO: 4931 - protein, 112 aa, Gammatorquevirus sp.; identical to SEQ ID NO: 4828

SEQ ID NO: 4932 - DNA, 2517 bp, Gammatorquevirus sp.
aaaaaataaaaaattgcaaaaattcggcaggtctaggggcaattcgggctagggcagtctagcggaacgggcaagaaactaaaataatatttttattttagaatgtcaagattctacaagaaaacaccatacaatgctactaccatagagcaaatgtggatgtctactgttaatgattttcatgatagtttctgctcttgctggcatggctttgctcatatgctagacctaatattccctgaaggccatacagacagagacaaaacaattaaagaaattattgacagagacatacaatgcctttctggtgggcaagaagaaaaaggccatggtttggcagaagaaattactttaagaggagacgccgctacacacgccgccgccgcagaagaagaattccaagaagaagatatagacgctctcgtttcagccgtagaacacgcagaaagaaggtaagaagaaaaaagaaaaaaatacctgtacaacaatggcaaccagacagcattagaaaatgtaaaattataggatataatgctttattatatggagctgaagggacacagtacctgtgctataccaaccaaagatttgtgctaacacctccacaatatggaggtggaggaggatttgctgtacaaacatttaccttagaatacttatatgaagaaagtaaatttagaaataatacatggacagcttctaatatcttttctgacctttgcagatacttaagagccaaagtatacttttacaggcacccaaaaatagactttgttgtaaactatcaaagacaaggcccctttgaactaaacaagtacacatatgcagcagctcatccctacatcctaatgcagtctaaacacaaaaaaattattcttagcaaaactacaaaccctaaaggaaaactttggaaaaaaattactattttaccaccaaaacaaatgctatccaaatggttttttcaaaaacaatttagtacctataacttattccaactgcaaggcgcagcagccagctttacttaccctagactaggttgctgtaatgaaaatagaattataacagtatattatttaaacccacagttttttcaacacagtacatgggcacaaactgttagtaaggcatatgttccttatgaccactataaaacccaactaactttttggtacccagaaggtaaaacacttaagtcttttacaccaggttatgttccaggcagtagccaagcagactattacagaagtatatcatatgaagaaggctttttttgcagacaggtactaacagccacaaaagtcacagacacaccaagctcacagtcaagtttagcatacttacctgtaaatgctgccagatataatccagaagaagacaatggagtaggtaattctgtatatttagttccagttaatgtaggatactatgataaaccaacagaagacaatttaatttttaaaaatgcaccactgtggctaatttttcatggatactatagcttcattgaaaaagttaaaactagcagctttatgccattacacatgtttgtaattagaagcccatttttaaaacctagaccttctgccattacaagagacttttttcccattatagacttaaactttaccataggaaacaatccctttaaagcatttatatctaaaacacaaaaaacactctggtatcctacatgtgaacaccaaactgagacaattaacagctttgttgaatcaggcccttatatacctaaactaaacaatgatagagacagtacttgggaattaccttaccattatattttttattttaagtggggaggaccaaatccaccacagcaagacatcagtgatccaaaaacaaagaacacctatattgtacccgatacaatgccgggaacaatacaaatatccaacccacttaaactatccacagaaacacttatccacaactgggacattagacgaggacaaattaaagaaaaagctcttaaaagaatatgcgaaaacacagagactgatacagatttcctcccagatcaggaacaaacaccaacaaaaaggccaagacttacaggagccctactacacccagaagaaaaaaacaaagaaatccagacatgtctccaggaactcttcaaagaagattccttccaagaaatccaagaagaccagacaaacatcctccagctcattcagcagcagcagcagcagcagcaactcaagcacaacctcataatgcttctacaagaaatgaaatacaaacaacaaatgcttcaactaactacaggtctactagattaacaagatttgctccaggctttgaagaaataactgaaagagaactagctatagctttttgcagaccccctagaacatataaagaagaccctcctttttatccctggctaccaaatcccgtaccccgtgtaaattttcatcttaactacaaattctaggccaacactgttcacttagtaaagcatgtttaataaagttttacccaaaaaaaaaaaaaaaa

SEQ ID NO: 4933 - protein, 667 aa, Gammatorquevirus sp.
MPFWWARRKRPWFGRRNYFKRRRRYTRRRRRRRIPRRRYRRSRFSRRTRRKKVRRKKKKIPVQQWQPDSIRKCKIIGYNALLYGAEGTQYLCYTNQRFVLTPPQYGGGGGFAVQTFTLEYLYEESKFRNNTWTASNIFSDLCRYLRAKVYFYRHPKIDFVVNYQRQGPFELNKYTYAAAHPYILMQSKHKKIILSKTTNPKGKLWKKITILPPKQMLSKWFFQKQFSTYNLFQLQGAAASFTYPRLGCCNENRIITVYYLNPQFFQHSTWAQTVSKAYVPYDHYKTQLTFWYPEGKTLKSFTPGYVPGSSQADYYRSISYEEGFFCRQVLTATKVTDTPSSQSSLAYLPVNAARYNPEEDNGVGNSVYLVPVNVGYYDKPTEDNLIFKNAPLWLIFHGYYSFIEKVKTSSFMPLHMFVIRSPFLKPRPSAITRDFFPIIDLNFTIGNNPFKAFISKTQKTLWYPTCEHQTETINSFVESGPYIPKLNNDRDSTWELPYHYIFYFKWGGPNPPQQDISDPKTKNTYIVPDTMPGTIQISNPLKLSTETLIHNWDIRRGQIKEKALKRICENTETDTDFLPDQEQTPTKRPRLTGALLHPEEKNKEIQTCLQELFKEDSFQEIQEDQTNILQLIQQQQQQQQLKHNLIMLLQEMKYKQQMLQLTTGLLD

SEQ ID NO: 4934 - protein, 117 aa, Gammatorquevirus sp.
MSRFYKKTPYNATTIEQMWMSTVNDFHDSFCSCWHGFAHMLDLIFPEGHTDRDKTIKEIIDRDIQCLSGGQEEKGHGLAEEITLRGDAATHAAAAEEEFQEEDIDALVSAVEHAERR

SEQ ID NO: 4935 - protein, 112 aa, Gammatorquevirus sp.
MSPGTLQRRFLPRNPRRPDKHPPAHSAAAAAAATQAQPHNASTRNEIQTTNASTNYRSTRLTRFAPGFEEITERELAIAFCRPPRTYKEDPPFYPWLPNPVPRVNFHLNYKF

SEQ ID NO: 4936 - DNA, 2517 bp, Betatorquevirus sp.
agtagattttacacctttagaaaacttatagtctaggggcaattcgggctagatcagtctggcggaacgggcaagaaacttaaatatatatgtttttttttagatatgagccttgttatgagagaatctaattttggacccagagcaaaagaaatacaatggcttaactgcattgttactactcatggaatgatttgtggatgtgaagacccttggaatcatttaaaacaaacattccaaaaccataaaataagatgcctctttattggagaaaccgatactacagacgccgccgtcaacactggagaagaagacgccttagaccttttagaaaatggagacctagaacgtattttcgccgaagatatacccgaagaaaccgggtaaggagaaaaagactatttcataaaaaactaaaaaacttaaaactaagacaatggcagcctagaaatattgtaaaatgtactatacgaggtgatattcctttgtttatatgtggaaaaactagaatatctcataactatactatgtacaaagaaagtaatactgaacctggagaagccacggggggaggttggagtattcaacaatttacacttaaaaatctatatgaagaataccttaaatacaaaaatatatggtcaaaaggaaaccaaggcctcccattagtaagatacactggctgtgacataaaactatacaaaaatccattcacagcctacatagtcacaataaaaaactgtccaccatacacagtcactaaagatatgtttttgaacacacaaccacaaagaatgctaatggaaaaacataagataatagtaccaagactaaaatcaacttctagaaaaacatacaaaaaaataaaactaaaaacacctgctttactgcagaacaaatggtactttcaacaggacttttgtactcaacctctccttaatataacagcatctgcatgcagcttagaacaaccatttgcacccgaaaacagagtaagcgactcaataacattaataagcttagaaacaaacacatttcaaaactctgactttgaaacagtaccagaatcagaaggctatataccaaaacatctcggaacaaaaaaaatgtacctttatggagtgaactcacaaagcggtaccgaaccacccaaaaggtggaaagatgttatctacctaggcaacacaggaacatattttgaaggcaactttcacataaagaaaataacagatcttagatcaaaaaataactggggaaatccttttgcttttccctggaatcatgacgaccatccaatttactacacagacaaattcccacaaataacagaaacactagaaaacgaagtagattttacacctttagaaaacttatatgtacaatgcagatacaatccacaaaaagacaaaggaacaaataacttagtatacctaaaacacaacaatcattcagaaacaacaccaatagcaacaccaccagacaatcctagattacagattaaagactttcctttatggttaatattttggggatggattgactggctaaaacgagtgccagaagcacaacaaatagacagtggttactatgttgttgtaaaatcgccatatatatatcccccaagaccttgctatgtatttttagacagatactttactaactcagatggaaaagacttaacaataagagacaaaatgaaatggcatcctaaatatgaacaacaaacagaagtagaattttacttggctcaaacaggaccttttgcaccaaaaataaacagatcagaactaatacaagctaatatgttctataaattttatttaaagtggggaggatgcccagctccaatggaaaacattgtctcaccatgcgaccaagaaaagtaccctgtccccaattcagagctacaaacacttcaaatccaagatccagaaacctcaaaattctcttacttatacgagtgggacgaaagacgaggacaaattacggaaagatgtgcaaaaagaattaaaaaagaacaaactgctgaattctctcttgcagacctgccaagcctcaatccctcaatcgaaacaccacaaaaagaaagcgaccaagagacgacatcggaagaagaaacgacaacactggagctccagctccagcagctcagacgacagcagcgcaaactccgaaagcagctccaccgactaacacaaaaaccactctacgaataataactttaaaaactagtatgtttggtgatgatttaagtaaaaacaggagactaactcctaaagaattggaagatgaaattcaaactgcttctgtatggcgtagacctgttagaacctatattaaagatttacctacttatccttactgcccttacaccccacttgctaactttgatttaaaatttaaataaaggcctgcaaactttcacactcggtgtccatttatttaagtaaaaacttatacaaacatccaccgcctcccaaatacgcaggcgcaaataacagaaacactagaaaacga

SEQ ID NO: 4937 - protein, 653 aa, Betatorquevirus sp.
MPLYWRNRYYRRRRQHWRRRRLRPFRKWRPRTYFRRRYTRRNRVRRKRLFHKKLKNLKLRQWQPRNIVKCTIRGDIPLFICGKTRISHNYTMYKESNTEPGEATGGGWSIQQFTLKNLYEEYLKYKNIWSKGNQGLPLVRYTGCDIKLYKNPFTAYIVTIKNCPPYTVTKDMFLNTQPQRMLMEKHKIIVPRLKSTSRKTYKKIKLKTPALLQNKWYFQQDFCTQPLLNITASACSLEQPFAPENRVSDSITLISLETNTFQNSDFETVPESEGYIPKHLGTKKMYLYGVNSQSGTEPPKRWKDVIYLGNTGTYFEGNFHIKKITDLRSKNNWGNPFAFPWNHDDHPIYYTDKFPQITETLENEVDFTPLENLYVQCRYNPQKDKGTNNLVYLKHNNHSETTPIATPPDNPRLQIKDFPLWLIFWGWIDWLKRVPEAQQIDSGYYVVVKSPYIYPPRPCYVFLDRYFTNSDGKDLTIRDKMKWHPKYEQQTEVEFYLAQTGPFAPKINRSELIQANMFYKFYLKWGGCPAPMENIVSPCDQEKYPVPNSELQTLQIQDPETSKFSYLYEWDERRGQITERCAKRIKKEQTAEFSLADLPSLNPSIETPQKESDQETTSEEETTTLELQLQQLRRQQRKLRKQLHRLTQKPLYE

SEQ ID NO: 4938 - protein, 93 aa, Betatorquevirus sp.
MSLVMRESNFGPRAKEIQWLNCIVTTHGMICGCEDPWNHLKQTFQNHKIRCLFIGETDTTDAAVNTGEEDALDLLENGDLERIFAEDIPEETG

SEQ ID NO: 4939 - protein, 57 aa, Betatorquevirus sp.
MFGDDLSKNRRLTPKELEDEIQTASVWRRPVRTYIKDLPTYPYCPYTPLANFDLKFK

SEQ ID NO: 4940 - DNA, 2517 bp, Gammatorquevirus sp.
cgggagcccgaggtgagtgaaaccaccgaggtctaggggcaactcgggctagggcagtctagcggaacgggcaagaaacttaaaactattatttattttacagatgcaaaacctgtgctcaaaggatttttacaaagaaacatactacaacagtgacaccaaaaatcaactgtggctagaaacagtacaaaatactcatgactgttactgcaactgcaatactccttatgctcatttgcttgcttgtcttttccctcctggccataaggaccgtgatactacaattcaagaaatcctacaaagagactacaaagaaagatgcctttctggtggaaacgcagacgcaggccctggttttacaacaacagatataaaagaagaagatacaagaaaagaagatttagaagaagactttggagaagaaaacctagacgagctcctcgccgccgccgcagacgcagaaaaaaggtaaggaggaaaaagaaaaagattccccttacccaatggcaaccagaaagcatagttaaatgtaaaattaaaggcattgactgcatggtactaggaggtgaaggcaaacaactactctgtttcactgatgaaaaagaccaactaataccacctagaactccagggggagggggtataggctttgaaagatattctctagaatacttatatggtcaatacaaacaaggtaataatatttggaccaaatctaatgaaacaaaagacctctgcagataccaaggatgcagtattaaactatatagacacccagaacaagattttattgtttcatacagcaatcaaccacccttcactatagacaaatacacatatccttcctgccatccacaacagcaactattacaaagaaaaaaaaaaatagtatatagtttagtctctagaccaagaggtaaaccatatacaaaaatattcataaagccaccaagacaaatgatagacaaatggttctttcaagaaatttttacaaaatatacattatttacacttaaagcctcagtatgtaatatgaactactcatttctaggctgctgcaatgaaaactggattgtaggcatgtttaacttaaacacatccttttacaaagatggctcctttggtatgcatagaacagaggcctacaaaccatatcctgaagtaccactaaatttaccctatgtaattcaaggaaaaacaggagaggaagaaaaaaaattgactattgacaacaactattactcctccattagctatgccaacggatggtttaattcagaatttttaaactgcaaatatgtaggtaaaataggtgttcacacagctacaaatccagtcactgtagccagatataacccctttatagacacaggaagacacaacaaaatttacattacaagcacactaaaaaaagactgggaccctccaacatcagacaaaagtctacttattgaaggcctacccctatggctaggcctattaggttacttaagctacgttgaaaaaattaaaaatgaaaccacatttttagacagccacttagtagttctagaaagtgatgcattttacacctacagtcaaattggaggatcaaacaaagttattccaattgactctaaatttatacaaggaaaagcaccatatgatcaatatttaacaacttcaatgaaaaaactgtggtttccaacaattaaaaaccaaatggaaaccttaaatgctatagtttcatgtggtccatatatgcctaaactagcaaacagaacaaacagtacatgggagttaaaactatcctatttatttcactttaagtggggaggacctcaagtacacaatgaaaaaatcaatgacccagaaacccaaggtgaatatgatggcccctttaacttccaacaaagactacaaattaaaaacccagaaaaacttaaaactcaatccattctgcactcctgggacttcagaaggggcattgttacaagctcagctcttaaaagaatgcacgaaaacctctcaattgatacatctctcgaaccagatacagaagaacctcaacaaaagaaaaagaaatacatcacaaacaagatgcccaacccctaccaagaaaaccaagaaatccaggagtgcctccaatcgctctgccaagaagaaatattccaagaagagacaccacaacacctccagcagctcatctacaaccagcagcagcaacagcagcagctcaagcaaaacctcctcatcctcctagcagatgtaaagagacaccaaagaatgatagaactccaaacaggtctactagactaacagaatttaaacccggatttgaacaagaaacagaagaacaacttgccagagcctttaaaagacctattagaaaatttaaagaggatgaccccttttacccatggctacctataacaccaagagttaattttcaccttaactttaaattctaggccgacactgttcacttagcggtgtttgtttaataaagtttgcaccccaaaaaaagctgcccatggg

SEQ ID NO: 4941 - protein, 659 aa, Gammatorquevirus sp.
MPFWWKRRRRPWFYNNRYKRRRYKKRRFRRRLWRRKPRRAPRRRRRRRKKVRRKKKKIPLTQWQPESIVKCKIKGIDCMVLGGEGKQLLCFTDEKDQLIPPRTPGGGGIGFERYSLEYLYGQYKQGNNIWTKSNETKDLCRYQGCSIKLYRHPEQDFIVSYSNQPPFTIDKYTYPSCHPQQQLLQRKKKIVYSLVSRPRGKPYTKIFIKPPRQMIDKWFFQEIFTKYTLFTLKASVCNMNYSFLGCCNENWIVGMFNLNTSFYKDGSFGMHRTEAYKPYPEVPLNLPYVIQGKTGEEEKKLTIDNNYYSSISYANGWFNSEFLNCKYVGKIGVHTATNPVTVARYNPFIDTGRHNKIYITSTLKKDWDPPTSDKSLLIEGLPLWLGLLGYLSYVEKIKNETTFLDSHLVVLESDAFYTYSQIGGSNKVIPIDSKFIQGKAPYDQYLTTSMKKLWFPTIKNQMETLNAIVSCGPYMPKLANRTNSTWELKLSYLFHFKWGGPQVHNEKINDPETQGEYDGPFNFQQRLQIKNPEKLKTQSILHSWDFRRGIVTSSALKRMHENLSIDTSLEPDTEEPQQKKKKYITNKMPNPYQENQEIQECLQSLCQEEIFQEETPQHLQQLIYNQQQQQQQLKQNLLILLADVKRHQRMIELQTGLLD

SEQ ID NO: 4942 - protein, 122 aa, Gammatorquevirus sp.
MQNLCSKDFYKETYYNSDTKNQLWLETVQNTHDCYCNCNTPYAHLLACLFPPGHKDRDTTIQEILQRDYKERCLSGGNADAGPGFTTTDIKEEDTRKEDLEEDFGEENLDELLAAAADAEKR

SEQ ID NO: 4943 - protein, 105 aa, Gammatorquevirus sp.
LPRRNIPRRDTTTPPAAHLQPAAATAAAQAKPPHPPSRCKETPKNDRTPNRSTRLTEFKPGFEQETEEQLARAFKRPIRKFKEDDPFYPWLPITPRVNFHLNFKF

SEQ ID NO: 4944 - DNA, 2516 bp, Gammatorquevirus sp.
cgggagcccgaggtgagtgaaaccaccgaggtctaggggcaactcgggctagggcagtctagcggaacgggcaagaaacttaaaacaaacttttgttttacagatgagcaactactctgctacacacttttttaaaccaacaccctacaacaatgacaccaaaaaccaaatgtggatgtccatgatagctgatgggcacgactgtatctgcaactgcaatagtccttttggccatctgcttgcttctatttttcctcctggtcatcaagacaggtttcttacagttgaagaaattattaacagagatattaaagaatgccattctggtggagacgcagacggaggccatggttcggccgctggagaagatataagaaaagatatcccagaagaagaaggcgcccactttataaaagacgaagagctagacgcactaatcgccgcaggagaagacgccggtggaaggtaagaagaaaaaagaagagaattaatattactcagtggcagccagaatctattagaaagtgtaaaataataggaatagaacctctttgtgtaggagctgaaggatctcaaatagactgttatactgttacaaaaacagactatgtgccacctaaagtaccatggggaggtggatttggcctagagaactttaccttaaaatatttatactcagaatatcaataccacaacaacatatggacaagtagcaactcacaaaaagacttatgtagatacacaggtggaaaatttatagtatttagacatccaacccaagactttgttctaagctatgatatacaaccaccacatgcacttaacaaatttacatttccaagctgtcacccacatcaacaactgctttctaaacatcacaaaattattcttagtcaagccagcaaacctaatggtaaatactataaaaaaataaaatttaaaccaccaaaacaaatgataacaaaatggttttttacaaagacattttcaccatcaagtcttatagtagtaaaagcagcagctgccaacttccaacatgttaacttaagtggtaaaaatacaaacatgttagttaccttatattccttaaaccttgccttttataaaaaccctgcttggggtcttaaaccaacttccgcaggctactggccacaagctggtgcacaatccaactatccctatgtagtaaaaaataaacaaggtcaagaagaagataaaagaatgactatcacaacaacatctgagtacttacaaacaattaattatagtactggctggtttaaacctgaatttctacaggcaattaaactaggttcaaaagcacaccctactgcattacaccaagttgtagcaggcagatacaaccctaacatagatgatggatctggaaatgaaatatactgtgccactatagtaggtacatcatggttaccacctacacaagacaaacaacttttaattacagacatgccactatggctaggattatatggatactactcatacattagagaaacaaaatctaaagacttttggaagttacatgtaattgttttaaaatccaaatccatacactgctacccagaagtaggtagctgtgacagatatgttttcatagactgggattatatacagggcaaaaaaccttatgatcaaacaataacagagaaagaaaaaacttactggtaccctgatatgtcttggcaaagaaaatctatgaatgccatagttgaatcaggtccatttatacctaaactatctgaagaaacttacagtacatgggaactaaacatgagatattatttttattttaagtggggaggtgcaaacacaggagaagcacaagttgaaaatccagaaatgctgcccacctatgatgtacccgattcaatgccaaaaacaatacaaattgttaacccagaaaaacaagcaccagaaacaatcttacacccctgggactaccgcaggggatttattaaagaaacagctcttaaaagaatgtgctcaaacatcgaaactgatacagaatttcaataccctacagaacaaacaccaaagaaaaaaagaagagtacaagcaactcttccaaatccccaggaagaaaatcaagaaatcaaggaatgtctcctctcgctctgcgaacaaagtacatcgcaagaggaggaagagcaagacctccacaagctcatcctcaagcagcagcacaagcaggaaaagctcaagtacaacatgttcaagctcctcctagacctaaaaaagaaacagagaataatacaacatcacacaggactactagaatgactccatttaaaaaaggctttgaaatggacactgaaaaagaactagcatatgcatttagtagaccccctagaatgtttaaagaagacactcctttttacccctggttacctaaactaacacccattgttaactttcaccttaattacaaattctaggcctacaaattcacttagtggtgtatctttctataagttacaaccccggctgcccatggg

SEQ ID NO: 4945 - protein, 661 aa, Gammatorquevirus sp.; identical to SEQ ID NO: 3904

SEQ ID NO: 4946 - protein, 121 aa, Gammatorquevirus sp.; identical to SEQ ID NO: 3905

SEQ ID NO: 4947 - protein, 111 aa, Gammatorquevirus sp.; identical to SEQ ID NO: 3906

SEQ ID NO: 4948 - DNA, 2516 bp, Gammatorquevirus sp.
gttgtgttgctgcttgatgagctctcggagacctaggggcaattcgggctagggcagtctagcggaacgggcaagaaacttaaaattgtttatttttcagatgtcagaaatatctttcaaagacttctactgtccaacaccttacaataaagaaactaaaaatcaaatttggatgtcccagattgctgattctcatgacaatatctgcgactgcaagtttcctttttgccatctgcttgcttctatttttcctcctggccatcaagaccgcgatctctcaattaaccaaatactgtttagagattacagagagaaatgcctttctggtggaaacgcagacaaaagagatggtatggcaggtttaggtggaaaagaagaccctataaagcaagaagaagaaaatatagaagaagaagacctagatggcctactcgccgccgccgcagacgccgccgaaggcacaaggtaagaaaaaagaaacaaaaaataactctaaaacaatggcaaccagactctgttaggagatgtaagattaaagccatatctactcttgttatgggagcagatggagcccaatataaatgctacacaaacgaagccacatcttaccctccaccaaaagagccttctggaggtggttttggagtagaaatttttactttacaacacatgtacaatttatataaagctcacaaatgcatatggactacttccaatgaatatatggacttagccagatacactggctgtaggtttattttttacagacatagagccacagactttattctttcatttgacttgcagcctccatttactatagacaaattcacatatccacaagctcacccacttaatcaatttctacaaagaaaaaaaagaatactatacagtcttaaaactaaaccatacggcccatctaaagttgttttaaaaattaagcctccaaaactgctatcaactaaatggttttttcaaaaagaacttgctaaaataccactagtaaaaattcaagcagctgcttgtgatcttagctatgctaacatgggaaaaacatggcaaagtaacatgttatctatatattttttaaacacagcattttatcaagaaagcaattggggtaactcaggcctcagtcattacctaccatataaaacaattagtaccaacttatggtactggtctaaagacagcagaggaaataaaactaaaatacaagtaaaaacagaaagttactattccacagttaattattctggtggatactttgataccagagttttaaatgcttattctataacaaacaatgataaatcagacacgccaccagctatggctctcacccctgtttctgtaggcagatacaatccattaacagacacaggagaaggcaatgaactgtgggctgtttccagcctcactgaacactatgaccatccagctacagacaaaactttaatttttaaaggctatccactgtggttaatgctttttggctttaaaaactacatagagcaagaaaaaggagataaaagatttttagactcctacttttttgtttttagatgtccaagcatgcaaatactacaatctgtagtaaaacaggattactttccatttatagaccaaagttttctaaatggaaacatgccatatggtgaatacttagatgaaaacaaaaaaaaattttggtatccaacaataagaaaacaactagaaacaattaacactcttgttacattaggcccatttataccaaagtttaaagatgacagagacagtacatgggaattaaactataaatgttcattttattttaagtggggaggacaacaaattacagaaaaacttgcaatggatcccagcaaacaagaccaatttgataacccctataacatgcaacagggaatacagatatccaacccacaaacacaaacatgggaaacaacactgcaccactgggactacaggagagacatacttacaaagtcagctattaaaagaatgcgagacaacctcgaaactgatacagatgtcacgccaattattacaggcaagccaccaaaacagagaaagatcacaggagaaatacaagcactccaacaagaaaacaaagagatccaagcatgtctccactcactcttcgaagaagataccttccaagaagaggagagtctccgagagctcatcaagcagcaacacaacaagcaacagcagctcaagcaaaacctcctacacctcatctcagacctaaaaaaacaacaacaacaccttcaaatgcaaacagggattctacattaactagatttaaaccaggttttgaacaaacaacagaaagagaacttgcaattgcttttaaaagacctataagaacttttaaagaagaccctccattttacccatggctgccccctgctccccttgttgtaaactttaacctcaactttaaaggctaggccaacactgtacacttagtggtgtttgtttaataaagtttgcttgagctgctgttgctt

SEQ ID NO: 4949 - protein, 661 aa, Gammatorquevirus sp.; identical to SEQ ID NO: 4752

SEQ ID NO: 4950 - protein, 127 aa, Gammatorquevirus sp.; identical to SEQ ID NO: 4753

SEQ ID NO: 4951 - protein, 109 aa, Gammatorquevirus sp.; identical to SEQ ID NO: 4754

SEQ ID NO: 4952 - DNA, 2516 bp, Gammatorquevirus sp.
taggggcaattcgggctagggcagtctagcggaacgggcaagaaacttaaaatatttttatttttagatgtacaaattctacaagcaaaccacttacaatggagacaccctaaaccaaatgtggatgtctcttattgctgactctcatgacattcactgcaaatgtgaagctccctttgctcacctactgcaaagcatttttccaccaggacacaaagacagacaactaacaattgaacaaataactaccagagattttctacaatgccattctggtggaacagaagacgaaagccatggtatacaacttggagaaagcgccgctacttcagcagaaagaaaagaaaacccagatacaaaagaagatatagaagaccttatactcgccgccgccgccgccgcaggagaaagagaaaggtaagaagaaaacttcaaaaaattactgttaaacaatggcagcctgacagcatagtaaaatgtaaaataaaaggctttgggtgtttagtagcaggagcacaaggaagacaaccttactgctacactaacagtaaatatgactacccacaaccaaaagcaccaggcggcggtgggtttggagctgaactatattccttacaatacttatatgaagaatgggtagccagaaaaaacatttggactaaaagtaatgactacaaagatttagttagatttactggtgcaactttttatttttttaaacatgcaaccacagattttattgtaagctacataagacaaccaccatttttactagaaaaggacttttttaatgacatacacccaatgcaactactattaagcagacaccacaaagtagttcctagccttcaaagaaagcctttaggcaaatcatatgtaaaaattaaagttagacctcctaaacaaatgctaactaaatggtttttccaacaagactttgcaacccaaggtttacttatattgcgaggagcagcagccaacttatcatgggcttactggggaccagatacacaaagcagatgcttaactttatactctttaaacaccacttttttctataactcagattattcagctagccatggcccacaaaccatgtacataccatacaatcactacccagtcactaacggacttacatactggacagaagataacaaaggaaatccaacaccacaccaaataaaacctcaaagctatgctgattcagtttcctatgaaaaaggttttttctcacaaccagtattacaagcaaaaaaaattactacatatgacgaggcagacagaaagcgctataaagaatatccacaagctatggcaagcttaccaatagctgtatacagatataacccagaagaagatacaggggtaggtaatgtagtttggctagcaactacaattaccaacaaccactggcaaagacctgaattatcagacaaagttatagttggaaaacccctttggttagcattttatggatttgaaagctacatagccaaaacaacaaaagacaaaggctggcttctaagtagcatgtttgtattcaaatgtccatacttaaaatctgtatctggagtaactacacaaaacacatttgtgttagttgatttagactttatacaaggtaaaatgccttattcagaaactcttactatacacaaaaaagcattatggtaccccaatgtagaaaaccaagtaaactcaatatcatcactagtacaagtaggcccttacatacctaaatatgcctatcaagatgagagcagctgggaactaacatacaaatatattttttattttaagtggggaggcccatatgtcacagatgaaccagttcaaaatcccaaaaaacaaggaaaatatcccgttcccgatactatcacacaagcaatacaagttagcaacccgctcaaacaaacctgtaaaacaatgcttagagactgggactacagaaggggtattattacaacaacagctcttaaaagaatgtcagcaaacctccaatctgattcatctgtccaatctgatgactcagaaactccaaagaaaaagaaaaagatcacagcagagatcccccactatcaagaaaagacacaagaaatgcagagctgtctcctctcgctcttcgaagaagatacctgccaagaaacagaagacctccagcaactcatccaccagcagcagcagcagcagcaaaagctcaagcacagcatcctcaagctcctaatggacttaaaacaccaacaaagaatactacaacaccacacaggaatagactaacttgttttaaacctggatttgaacaagaaacagaagaacagttagcacaagcatttaaaagacccattagaaaatttaaagaagacccacccttttacccttggctacccactgctgtacccattgtaaactttcaccttagatttaaagactaggccgacactgttcacttagcggtgtttgtttatataagtttgcaccccaaaaaaattgtaaaataaaaaaaaaaaaaaaaa

SEQ ID NO: 4953 - protein, 671 aa, Gammatorquevirus sp.; identical to SEQ ID NO: 3605

SEQ ID NO: 4954 - protein, 117 aa, Gammatorquevirus sp.; identical to SEQ ID NO: 3606

SEQ ID NO: 4955 - protein, 108 aa, Gammatorquevirus sp.; identical to SEQ ID NO: 3607

SEQ ID NO: 4956 - DNA, 2516 bp, Gammatorquevirus sp.
aaaaaaattgtaaaataaaaaaaaaaaaaaaaataggggcaattcgggctagggcagtctagcggaacgggcaagaaacttaaaatatttttatttttagatgtacaaattctacaagcaaaccacttacaatggagacaccctaaaccaaatgtggatgtctcttattgctgactctcatgacattcactgcaaatgtgaagctccctttgctcacctactgcaaagcatttttccaccaggacacaaagacagacaactaacaattgaacaaataactaccagagatttcctacaatgccattctggtggaacagaagacgaaagccatggtatacaacttggagaaagcgccgctactttagcagaaagaaaagaaaacccagatacaaaagaagatatagaagaccttatactcgccgccgccgccgccgcaggagaaagagaaaggtaagaagaaaacttcaaaaaattactgttaaacaatggcagcctgacagcatagtaaaatgtaaaataaaaggcttaggttgtttagtagcaggagcacaaggaagacaaccttactgctacactaacagtaaatatgactacccacaaccaaaagcaccaggcggcggtgggtttggagctgaactattttccttacaatacttatatgaagaatgggtagccagaaaaaacatttggactaaaagtaatgactacaaagatttagttagatttactggtgcaactttttatttttttaaacatgcaaccacagattttattgtaagctacataagacaaccaccatttttactagaaaaggacttttttaatgacatacacccaatgcaactactattaaacagacaccacaaagtagttcctagccttcaaagaaagcctttaggcaaatcatatgtaaaaattaaaattagacctcctaaacaaatgctaactaaatggtttttccaacaagactttgcaacccaaggtttacttatactgcaaggagcagcagccaacttgtcatgggcttactggggaccagatacacaaagcagatgcttaactttatactctttaaacaccacttttttctataactcagattattcagctacccatgacccacaaaccatgtacataccatacaatcactacccagtcactaacggacttacatactggacagaagataacaaaggaaatccaacaccacacacactaaaaccttcaaactattctgattcagtttcttatgaaaaaggttttttctcacaagcagtattacaagcaaaaaaaattactagatataacgaaacacaaagagacctgtataaaacatatccacaagctatggcaagcttaccaatagctgtatacagatataacccagaagaagatacaggggtaggtaatgtagtttggctagcaactacaattaccaacaaccactggcaaagacctgaattatcagacaaagttatagttggaaaacccctttggttatcattttatggatttgaaagctacatagccaaaacaactaaagacaaaggctggcttctaagtggcatgtttgtattcaaatgtccatacttaaaatctgtatctggagtaactacacaaaacacatttgtgttagttgatttagactttatacaaggtaaaatgccttattcagaaactcttactatacacaaaaaggcattatggtacccaaatgtagaaaaccaagtaaactcaatatcatcactagtacaagtaggcccttacatacctaaatatgcctatcaagatgagagcagctgggaactaacatacaaatatattttttattttaagtggggaggcccatatgtcacagatgaaccagttcaaaatcccaaaaagcaaggaaaatatcccgttcccgatactatcacacaagcaatacaagttagcaacccgctcaaacaaacctgtaaaacaatgcttagagactgggactacagaaggggtattattacaacaacagctcttaaaagaatgtcagcaaacctccaatctgattcatctgtccaatctgatgactcagaaactccaaagaaaaagaaaaaaatcacagcagagatcccccactatcaagaaaagacacaagaaatgcagagctgtctcctctcgctcttcgaagaagatacctgccaagaaacagaagacctccagcaactcatccaccagcagcagcagcagcagcaaaagctcaagtacaacctcctcaagctcctaatggacttaaaacaccaacaaagaatactacaacaccacacaggaatagactaacttgttttaaacctggatttgaacaagaaacagaagaacagttagcacaagcatttaaaagacccattagaaaatttaaagaagacccacccttttacccttggctacccactgctgtacccattgtaaactttcaccttagatttaaagactaggccgacactgttcacttagcggtgtttgtttatataagtttgcacccc

SEQ ID NO: 4957 - protein, 671 aa, Gammatorquevirus sp.; identical to SEQ ID NO: 4645

SEQ ID NO: 4958 - protein, 117 aa, Gammatorquevirus sp.; identical to SEQ ID NO: 4646

SEQ ID NO: 4959 - protein, 108 aa, Gammatorquevirus sp.; identical to SEQ ID NO: 4647

SEQ ID NO: 4960 - DNA, 2516 bp, Gammatorquevirus sp.
tgcaccccaaaaaaattgtaaaataccgaggtctaggggcaattcgggctagggcagtctagcggaacgggcaagaaactaaaatttatttttaatttacagatgctcagcaccaaagatttttacaaaaaaactaaatacaatgcagaaaccaaaaaccaactatggtgctcaataatagctgattctcatgatggatactgtggctgtgaaacaccatttgctcatttactagcctgcatttttccacctggacacaaggacagagatcttactataaaccaaatacttgagagagactacaagcaaatatgcctttctggtggaggagaagaagaaagccatggtatggcaggtggtttaccaggagaaggagacgcccctggggtaaaagaagaagaagaagaatatataaaagacgaagaactagaaaacttaatcgccgcaggagaagacgccggtacaaggtaagaagaaaaaaacaaaccattactgtaaaacaatggcaacctgactccattagaaaatgttttataaaaggacatggaactctagtagttggagctgaaggcactcaaatgttttgttatactaaagacaagtttaaatatgtgcctccgaaaactccttatgggggtggttttggagctgagagatacaccctaagatttttatatgaagaatatcagttccacaacaatatctggactgcatcaaacttatacaaagacttatgcagatttctatgggttaaatttatattttacagacacccagaaacagattttgttatatcatacagtaggcaaccaccatgggacttaaataaatttacataccctagctgtcacccacaacaaatgctactacaaaaacataaaaaaattgtattaagtcaagctagcaaaccaaatggtaaatacaaagtaaaagtgctaattaaacctagtaaacaactaattagcaagtggttctttacaaaaccattttcagaatatggcctactatttcttaaaggatctgcacttaatttaagatatagctttttaagtgcaagcaatgaaaacatgttagttaacatcagtagtcttaatccttcctggtacataaacacagactgggccagagcaagagcaaacacacaaggttacctaccacaaacttcaatgaatacacatctttggtatgacaataaaacagcaggtggtggcactaaacaaacagaagtaccttcagaagtatttaatacatatcaagacagtataaactatactaaaggctggtttaatgccaattttttaagagctattgcactatactcaccctcacaagcaacaaaactagcacaactaccattaaactatggaagatataatcctacaagagataaaggtactggaaataaaatatatatcataagtactatagcagatagctggggacctccaacaacagacaaaaatgtactaatcacagacatgcccctatggctaggcctatatggttatgttagctacctagaaacaataaaaccacctgactggttaaaaagctcccttatagtacttgaatctgattatatataccactcagccacacctgtaccgtctactaaatgggcaccaattgacagtgactacatagatggcaaaaaaccatatggccaaattataacagaacaagaaaaaaaactatggtaccccaactataaatggcaattaaaaactctaaatgcaatagtagaatgtgggccttttatacaacagtacattgaagaaaaaaacagtacatgggaacttaaatacttttacaacttttattttaagtggggaggaccccaaattccaggacaagacattaaaaatccacaggaacttaacacctatgatgtacccgataaactgtttggcaaaatacaaattaccaacccagccaaacaagctccagaaactattctccagccctgggactacaggagaggacttattaaagaaacagctcttaaaagaatgtgcacacacctcgaaactgattcagaatttgaatattctccagaacaaagtccaaagaaaaagaagcagagaattggagcagccctcagagacccacaggaagaaatcaaggaagcacagaactgtctcctctcgctctgcgaagaaagtacatgccaagacccgcaaaaccaaacactcgagcagctcatccagcaccagcaacacaaacagcagcagctcaaatacaacattgtcaagctcctcatagacctaaaggaaaaacagaaaatgatacaactacaaacagggttactagagtaaccctaacaagatttaaagatggatttgaaagagaaactgaaaaccagttagcacaagcatttaacagaccccctagaatgtttaaagaagacacacccttttatccttggctacctagacctgaacccattgtaaactttcaccttaactttaaattctaggcctacactgttcacttagtggtgtatgtttatataagtt

SEQ ID NO: 4961 - protein, 667 aa, Gammatorquevirus sp.
MPFWWRRRRKPWYGRWFTRRRRRPWGKRRRRRIYKRRRTRKLNRRRRRRRYKVRRKKQTITVKQWQPDSIRKCFIKGHGTLVVGAEGTQMFCYTKDKFKYVPPKTPYGGGFGAERYTLRFLYEEYQFHNNIWTASNLYKDLCRFLWVKFIFYRHPETDFVISYSRQPPWDLNKFTYPSCHPQQMLLQKHKKIVLSQASKPNGKYKVKVLIKPSKQLISKWFFTKPFSEYGLLFLKGSALNLRYSFLSASNENMLVNISSLNPSWYINTDWARARANTQGYLPQTSMNTHLWYDNKTAGGGTKQTEVPSEVFNTYQDSINYTKGWFNANFLRAIALYSPSQATKLAQLPLNYGRYNPTRDKGTGNKIYIISTIADSWGPPTTDKNVLITDMPLWLGLYGYVSYLETIKPPDWLKSSLIVLESDYIYHSATPVPSTKWAPIDSDYIDGKKPYGQIITEQEKKLWYPNYKWQLKTLNAIVECGPFIQQYIEEKNSTWELKYFYNFYFKWGGPQIPGQDIKNPQELNTYDVPDKLFGKIQITNPAKQAPETILQPWDYRRGLIKETALKRMCTHLETDSEFEYSPEQSPKKKKQRIGAALRDPQEEIKEAQNCLLSLCEESTCQDPQNQTLEQLIQHQQHKQQQLKYNIVKLLIDLKEKQKMIQLQTGLLE

SEQ ID NO: 4962 - DNA, 2515 bp, Gammatorquevirus sp.
cgggagcccgaggtgagtgaaaccagcgaggtctaggggcaattcgggctagggcagtctagcggaacgggcaacacacttaaaacaatttttattttatagatgtctatatatagacctacaaaatacaacaaagaaaccaaaaaccaactatggatgtcagcaattggagatatacatgatggattttgtggatgcaacattccctttgcacacctgctagacaacatatttccagaagggcatacagatagaaataaaaccattgctgaaattattcaaagagatatacaatgcctttctggtggagacgaagaaaaagaaattggtatggcaactggtacagatactggagaaaaaggaggcctcaaaagagaagaagaagaagaagacggcctcgcagacgaagatatgctacaaggacttatagacgcaggagaagacgccactacaaggtaagaagaaaaaaaaaaaagattcctgtaactcaatggcaaccagactctattagaaaatgtaaaattataggcctaggaacacttgttctaggagcagaaggcacacaaatgtactgttatactacagaaaaggacaaatatgtgccacctaaatacccctatggaggaggatttggagtagaaatttttaccttaaggtatttgtatgaacaatattgtatgcataacaacatatggacaacatcaaatgactttaaagacttactcacataccatggctgcaaaataactttttttagacatccagaaacagactttatagttagctacacaagaacaataggtgagggcataactaaatacacattcccagcagtacacccacaccaacaattcttaaacaaaagacacaaagttatatttagcacagcaacaaaaccaaatggaaaacccacagtaaaaatgtttataaaaccacctaatcaaatgctaactaaatggttctttgcaaaaaactttacaaagtatccattatttacaattagagctgcagcagtaaacttaagatactcatacctaagtaacaaaaaccaaaaccaactagttaatatatttgcaattaacccagacttttatatgcacacaaactgggaccaagcctttactagtgaccaccactatcttccatatacaggtattccaaacccactaaagtacaaaattaaaacagcatctggtagttttcaagacaaagaactgagctgcgacaaaaaaaactgtttaaatattacctctggctattttaacagccaatttttaaaagctgtagaaattcctgtgcaaggaacacacacagctacaacccccttactattaggtagatataacccaaccatagacgatggctcaggcaaccaaatatacttagtaagtacagtagcagatagctggcaaccaccaagcaaagacttaaacttatttctatcaggcatgcctctgtggctaggtttatatggcttcttgagctttattaatactattaaaccagctcctgaatttttaaaaactcacttgctagttttacacagcgatgctatacactgctggcctcaaataggagggtgcaaaaaatatgcacctctagactgggaatacatacaaggtaaaaaaacatgggaccaagacatactagaatcagacaaaagtaggtgggccccaaattgcacatggcaaatgaaaaccttaaatgctatagttgaatcaggtccatttataccacaatatgcagaccaactaaacagtacctgggaactaaaatataaatataaattttattttaagtggggcggtccacaaaaccatgaaccagatgtcaaagatcccaatgaccttcccacctttgatgtacccgatacaatcaaccagagaatacaaattaggaacccagaaacccaaggcacagaaactatccttcatccctgggacttcagaaggggattcgttacagaaacagctcttaaaagaatgtatgaacacctcccacctgattcagaaattgaactcattacagaaccaccaaaaaagaagaagagaaaaggagccgcataccaagacccacaagaagagaaccaagaaatccagagctatctccaggctctctgcaaagaaaataccttgcaagagcaagaaacagatgtccagcaactcatcctcaaccagcagcagcagcagcaggaactcaagtacagcatcctcaagctcctcttagacttgagggacaaacaaaaaatgctacaactacaaactggactattagactaacaaagttcaaacctggacatgaactagaaacagaaaaacaagtagctgcagcatttaaaagaccccctagaacctataaagaagattttcctttttatccctggcttcctcctgaaccctatgtaaactttcaccttaactttaaaggctaggcccacaaatttcacttagtagagtatgtttatataagtcacacccccaataaaccagcgaggaggtccccagctgcccgtggg

SEQ ID NO: 4963 - protein, 661 aa, Gammatorquevirus sp.
MPFWWRRRKRNWYGNWYRYWRKRRPQKRRRRRRRPRRRRYATRTYRRRRRRHYKVRRKKKKIPVTQWQPDSIRKCKIIGLGTLVLGAEGTQMYCYTTEKDKYVPPKYPYGGGFGVEIFTLRYLYEQYCMHNNIWTTSNDFKDLLTYHGCKITFFRHPETDFIVSYTRTIGEGITKYTFPAVHPHQQFLNKRHKVIFSTATKPNGKPTVKMFIKPPNQMLTKWFFAKNFTKYPLFTIRAAAVNLRYSYLSNKNQNQLVNIFAINPDFYMHTNWDQAFTSDHHYLPYTGIPNPLKYKIKTASGSFQDKELSCDKKNCLNITSGYFNSQFLKAVEIPVQGTHTATTPLLLGRYNPTIDDGSGNQIYLVSTVADSWQPPSKDLNLFLSGMPLWLGLYGFLSFINTIKPAPEFLKTHLLVLHSDAIHCWPQIGGCKKYAPLDWEYIQGKKTWDQDILESDKSRWAPNCTWQMKTLNAIVESGPFIPQYADQLNSTWELKYKYKFYFKWGGPQNHEPDVKDPNDLPTFDVPDTINQRIQIRNPETQGTETILHPWDFRRGFVTETALKRMYEHLPPDSEIELITEPPKKKKRKGAAYQDPQEENQEIQSYLQALCKENTLQEQETDVQQLILNQQQQQQELKYSILKLLLDLRDKQKMLQLQTGLLD

SEQ ID NO: 4964 - protein, 118 aa, Gammatorquevirus sp.
MSIYRPTKYNKETKNQLWMSAIGDIHDGFCGCNIPFAHLLDNIFPEGHTDRNKTIAEIIQRDIQCLSGGDEEKEIGMATGTDTGEKGGLKREEEEEDGLADEDMLQGLIDAGEDATTR

SEQ ID NO: 4965 - protein, 104 aa, Gammatorquevirus sp.
LQRKYLARARNRCPATHPQPAAAAAGTQVQHPQAPLRLEGQTKNATTTNWTIRLTKFKPGHELETEKQVAAAFKRPPRTYKEDFPFYPWLPPEPYVNFHLNFKG

SEQ ID NO: 4966 - DNA, 2514 bp, Gammatorquevirus sp.
aaaaattgcaaaaattcggcgctcgcgcgcgtctaggggcaattcgggctagggcagtctagcggaacgggcaagaaacttaaaacaatatttgttttacagatgtccagattctacaaagaagtaccatacaacaaagacaccaaatgtcaaatgtggatgtctatgattagtgatggtcatgatattcactgtggatgttgtcaaccatttgcacacctactagacagcatttttccagagggacacgcagacagaaacaagaccattgaacaaataatacaaagagatttacagctatgccattctggtggaacagaagaagaagaccatggtatcccacttggaggaagcgccgctacagaaacacccgctacagaaaatataaaagaagaagaagacctagacgccctgcttatcgccgccgccgccgccgtagaagatacaaggtaaggagaaaaaaaaaaagaataactatacaacagtggcagccagacaaaatagttaaatgtaaaattataggatatggataccttgtagcaggaactgaaggaaaccaatttagatgttatacaaatgataaacataactatggacaaccaaaagctccaggcggtggcggttttggctgtgaacaatatacacttgaatatttatataaagaatgggaagctcatagatgcatatggactagatctaatgactacctagacctagtaagatacacaggctgcatattttatttttatagacatcctaaaacagactttatcatatggtatgacagacaaccaccatttaaatttacaactactacttacttagaaacacatccactatccatgttactaaaaagacaccataaagtaataagatccctagaacataacccaaaaagcaaaccatatgttaaaataaaaataccaccaccaaaacaaatgataaccaaatggtttttccaaccagactttgcagatgtaccattatttaaactctgtggatctgccagcaactttggatactcactctacggacccaatacacaaagccccaacttaaccatatatgccttaaacacagatttctatgttatacacaattgggcagattcaagcttaactactagagggtatgaaccatacgcaggtgtacctagcactattaaatttaaatataaaataggcaataaaacaggtgaagtaggacctccacaaaaacaatatacagacagcatttcatatgcagacggctggtttagaccagaaatattaaatgcatatgaagttactgaccatggcgtagccacatacaacagaccagtgtcaataggcagatacaatcctgaagaagacaatggtaaaggcaatagaatatggctcacaagcattatagcaaacaaaggctgggccccacctactgacaaagatttaattataggtgaaattcctctatatatggcattttggggtttgtgggactatattgctcagtctagaaaaacagaagaatacttagcaatatcaatgtttgtagttaaatctgactacataaaaatagttttaggaggcccacaccaaaaagtgtggccaataatagactggtcctttatacaaggtaaaatgccatgggatgaatcccttactatacaagaaaaggccagatggtaccctacatgctacaaacaaacccaaactataaacaattttgtagaatgtggaccatactgtccaaaatatgcaaacttacctgtatctacttggcaactaccttacaaatataaattttactttaaatggggtggaccccagacaggagagaacattgttcaagatcccaaagaccaagaaaaatatcccgttcccgatactttcacagaagcaatacaaatcagagacccgctcaggcaacacccaaaaacactccttagatcctgggacttcagaagggacattgttacaaaatcagctcttaaaagaatgcaagaaaacttatcaactgatgaatctgaacaatctgatttctcagaaacaccaaaaaagaaaaagaaagtcacaacagagatcccatgcagcgaccaagaagagaaggacctccaaacatgtctcctctcactctgcgaaaaagataccttcccagaagagacagaagacctcaagcagctcatctaccagcagtatcacaagcagcaacagctcaagaacaacctctacaagctcctcaaaaacctaaagaaaacccaagcacacctgcaaatgcaaacaggcatgcattaacccgctttaaaaaaggctttgagtgggacactgaactagaactagcttcagcatttaacagaccacccagactttttaaagaagactcccctttttacccctggttacccaaaccaacacctattgtaaactttcaccttaattacaaattctaggcctacactattcacttagtggtgtatgtttatataagtcacacccccaaaaaaattgtaaaataaaaaaaaaaaaaaaaaaaata

SEQ ID NO: 4967 - protein, 657 aa, Gammatorquevirus sp.; identical to SEQ ID NO: 3972

SEQ ID NO: 4968 - protein, 116 aa, Gammatorquevirus sp.; identical to SEQ ID NO: 3973

SEQ ID NO: 4969 - protein, 120 aa, Gammatorquevirus sp.; identical to SEQ ID NO: 3974

SEQ ID NO: 4970 - DNA, 2512 bp, Gammatorquevirus sp.
gtctaggggcaactcgggctagggcagtctagcggaacgggcaagaaacttaaaccaatatttgttttacagatgtcaaccctctttaaaccaacaaaatacaatggctgtactaaaacccaactatggatgtcaataataagtgattctcatgacattcactgtggttgtgaagtaccttttagccatctattagacagcatctttcctgaaggacaccaggacagaaacaaaaccatagcacaaataattgccagagacacagcacaatgccattctggtggtacagaagaaaaaagccctggttttacaaccatcaaagaagaagatataaaaggacatggaaaagaaaacccagaagaagaccttatagaagacgccgctttacaagaactaatcgccgcaggagaagacgccataggaaggtaaggaaaaaaagaaaaaccttacctgtcagacaatggcaaccagactctattagaaactgtaaaattagaggcttctcaacacttgtagttggggctgagggaacacaaatgtactgttatacagaagaaaaatttaactatgtaccccctaaagttccctggggagggggtattggagttcaaaactatacacttaaatacttatatgaagagttaattttccataacaatttttggacagcttcaaatattcaaaaagacttatgcagatacttaagatgtaaaattatattatttagacaccccacacaagactttgtagtagtatatgaaagacagcctccatttacattaaccaaatggacctacccaagctgtcacccacaccaaatgcttttacaaaaacacaaaaaaattttacttagcttaaaatctaaacccaatggaaaatactataaaaaactaattattaaacctccaaaacaaatgatatctaaatggttttttaccaaaagcttttgcactgaatctctatttcttcttaaaggagcagtagctaactttagaaattcatatttaagtgcaagcaatgaaaacagacttgtaaatatcatgtcacttaacacaaagttttaccaacattgtaactgggcacaaaccagacagcaacaaaccccatacttaccatacacaaatgcaccaacaaacatgcagtacagagttaaagccaaagatggttcaactaaaacctttactatggatataaaaacatatactgaaagtataagttatgataaaggctggtttaaaagcgcatttttacaagcctatgaaataccagtacaatccagtcatgcagcaacaatacctatgttaatagctagatacaatcctaacaaagacacaggagaaggtaataagatatttattaaatcagtactatcagatggatgggtaccaccatcaacagataaacaactagaactagacaatgtacctctatggctaggtttactaggatttttatcatatgttaaacaaactaaaaatatagactacttaaaatcttcagtagttgtacttaaaagccaagctatacactgctcaagccaaataggcagctgtgacttatactgccccatagatactgaatacattctaggtaagaaaccatatgaacaagttataacccaaactcaaaaagcactgtggtatcctacaactgaatggcaattaaaaactttaaatgccattgtagaatcaggcccctatataccaaaactatcagaagaaaaagaaagtacatgggaactaaaatacatgtataattttttctttaagtggggtggaccccatactccagacaaagacatcacagatccagaaaactttaacacccatgatgtacccaatactatcacaaggtcaatacaaattaccaacccagaaaaaaacacaacagaaacaatactacacccctgggacttcagaaggggtattgttaaagaatcagctcttaaaagaatgtgcgaccacctcgacactgatacagaatttcaattctctacagaagaaactccacagaaaaagagaaagatccaaggagcagccctacaacacccccagaaagaaacagaagaaatctacaactgtctccatggtctctgcgaaaaaagttcattcccacaagaagaagaaaagacactcgaagcactcatccagcagcagcagcagcagcaggagctactcaagtacaacatcctcaagctcctaatggacctccgagacagacagaaacagctacaactacacacaggaatgttacattaacaagatttaaaaaaggctttgaagaagacacagaaagagaaataagcatagctttttgcagacccccaagaacctataaagaagaccccccattttacccttggctaccaaaatttgaaccccttgtaaactttcacctaaacttcaaaggctaggccaacaatgtacacttagtaaagcatgtttatataagcagcacacttaataaagtaaataaaaaaaaaaaaaaaaaaaaaataaaaaattgaaaaaat

SEQ ID NO: 4971 - protein, 662 aa, Gammatorquevirus sp.
MPFWWYRRKKPWFYNHQRRRYKRTWKRKPRRRPYRRRRFTRTNRRRRRRHRKVRKKRKTLPVRQWQPDSIRNCKIRGFSTLVVGAEGTQMYCYTEEKFNYVPPKVPWGGGIGVQNYTLKYLYEELIFHNNFWTASNIQKDLCRYLRCKIILFRHPTQDFVVVYERQPPFTLTKWTYPSCHPHQMLLQKHKKILLSLKSKPNGKYYKKLIIKPPKQMISKWFFTKSFCTESLFLLKGAVANFRNSYLSASNENRLVNIMSLNTKFYQHCNWAQTRQQQTPYLPYTNAPTNMQYRVKAKDGSTKTFTMDIKTYTESISYDKGWFKSAFLQAYEIPVQSSHAATIPMLIARYNPNKDTGEGNKIFIKSVLSDGWVPPSTDKQLELDNVPLWLGLLGFLSYVKQTKNIDYLKSSVVVLKSQAIHCSSQIGSCDLYCPIDTEYILGKKPYEQVITQTQKALWYPTTEWQLKTLNAIVESGPYIPKLSEEKESTWELKYMYNFFFKWGGPHTPDKDITDPENFNTHDVPNTITRSIQITNPEKNTTETILHPWDFRRGIVKESALKRMCDHLDTDTEFQFSTEETPQKKRKIQGAALQHPQKETEEIYNCLHGLCEKSSFPQEEEKTLEALIQQQQQQQELLKYNILKLLMDLRDRQKQLQLHTGMLH

SEQ ID NO: 4972 - protein, 118 aa, Gammatorquevirus sp.
MSTLFKPTKYNGCTKTQLWMSIISDSHDIHCGCEVPFSHLLDSIFPEGHQDRNKTIAQIIARDTAQCHSGGTEEKSPGFTTIKEEDIKGHGKENPEEDLIEDAALQELIAAGEDAIGR

SEQ ID NO: 4973 - protein, 111 aa, Gammatorquevirus sp.
LSPWSLRKKFIPTRRRKDTRSTHPAAAAAAGATQVQHPQAPNGPPRQTETATTTHRNVTLTRFKKGFEEDTEREISIAFCRPPRTYKEDPPFYPWLPKFEPLVNFHLNFKG

SEQ ID NO: 4974 - DNA, 2512 bp, Gammatorquevirus sp.
tgttcccgatacagtctttgaaacagtacaatctaggggcaattcgggctagggcagtctagcggaacgggcaagaaacttaaaatgtattttattttacagatgcaaaacctatgtggagaagatttttatgttaaaacaccatacaatgcagtaactaaaacacaaatttggctaagtcaagttggagattctcacgacaatttctgtcactgccaaactgcttatgctcatttgcttgcttctatatttcctcctggccatcaagataggaataaaactattgaagaaatacttcaaagagactacaaagaaagatgccattcttctggagacgcagaaacaagaactggtatggcagatttagaagacaaaggtttagaaaatataaaagaagaagatggcccagaagaagatatagaaggcctgctcgccgccgccgccgccgtagaagaagaagacacaaggtaagaagaaagaaacaaactataactcttaaacaatggcaaccagactctattagaaaatgtaaaattaaagggtttaactgcattgtagcaggagctgaaggcagacaattcttctgctatactaatgaaaagactaactatatacaacctaaagcaccaggagggggaggctttggtgtagaactttattctcttgactacctatactctcaatggttaaaaaagcaaaacatatggacacatactaatgaatacaaagacctagttagataccaaggctgcagaataacattttttagacatgaaaaagtagactttgtagttcaataccaaagacaacctccatttttaattcaaaaacatacatacatgcaatgccatccacaaaacttactgttaactaaacaccataaagttattctatccaaaaaacataaacctactggtaaaaacactgtttccatatttataaaaccgccaaaacaaacagtatctaagtggttttttcaagatgaattcagtaaatatggcttatttcaattgcaagctgcagctgcaacatttggatacccaacatatgggccaaacacacaaagtacaaacttaacattctatgccttaaacaccagattttatcataacacagactgggcacaagaaaaaagtcagcaacacggatacaaaccctacacaaactttgatgataacattaaattttactatccaacacaaagtggaacctctgccattacacatgcaaacacaaccacctataccaaatcaatagactacaccacaggagtattccaaagcaaaatacttttatctactaaaatagaaggcacaacaacattcgtccatgaaagacccattacaatagctagatataatccagaagatgacaatggaataggcaactctgtttaccttgtatctataatatctgacacagggtgggctgaaccaaaagacaaagacttagtactacacaatgtaccattatatatagctttttatggcttctggaactatatactaaaagtaaaaggagacaaaaatttccttaaataccatatgtttgttgttaagagtgaagccataaaacttgttgttaacacagaacaaaaagagttccccatacttgactggagctttataactggcaaaatgccttatggtgaactactaacagagtcagacaaaaaattttggtaccccacatcctataaacaacaagaaataataaatgccatagtagaatgtgggccttatatacctaaactgtcaaatcaaccatcaagtacatggcaactttattacaaatactgtttttattttaaatggggcggtccacagattacagaccaacttgcagaaaacccaaaagaaaaaggcaaatatgatgttcccgatacagtctttgaaacagtacaaattactaacccaaacaaacaaagctgcaaatctatgcttagagcctgggactacagaagggggattattacacaaagagctcttaaaagaatgtcagaagacatccaaactgattcatctttcgaacctgatgatgcagaaacaccaaagaaaaagaaaaaggcaactggagaactccccgcagcccaagaagaaaaccagaaaatgcaggcctgtctcctctcgctcttcgaagaaagtacctgccaagaccaagaaaacctacagcagctcatccagcaccagcagcagcagcagcaaaagatcaagcacaacatcctcaacctcctcctagacttaaaaaagaaacagagaataatacaaatgcaatcaggcctggactaacaagattcaaaccaggatttgaatgggacactgaatgtgagatagcacaagcatttagaagaccccctagactgtttaaagaagacaaacccttttatccatggctacccaaattagaaccccttgttaactttcacctcaattttaagttctaggccgacactgttcacttagcggagtctgtttatataagtttgcaccccaaaagaaaaaggcaaatatga

SEQ ID NO: 4975 - protein, 656 aa, Gammatorquevirus sp.; identical to SEQ ID NO: 3375

SEQ ID NO: 4976 - protein, 128 aa, Gammatorquevirus sp.; identical to SEQ ID NO: 4729

SEQ ID NO: 4977 - protein, 108 aa, Gammatorquevirus sp.; identical to SEQ ID NO: 3377

SEQ ID NO: 4978 - DNA, 2512 bp, Gammatorquevirus sp.
aaaaataaaaaattgcaaaaattcggcgctcgcgaggggcaactcgggctagggcagtctagcggaacgggcaagaaacttaaaacaaaactttgttttacagatgtctagattctacaaaccaacaccttacaatggatgtacaaaaactcaaatgtggatgtccatgatatcagatggccatgatatgcattgtggatgttgtcaaccatttgcacatcttctagattctatttttcctgaaggacacactgacagagataaaccaatatcatatataattaaaagagatcttcaacaatgcctttctggtggaatagacgaagaaaaccatggtatacaacttggagaaagcgccgccgccttttctggaataaaagaagaaaaagaactcacagaagaagaaaacctagacgctttactcgccgccgccgcagaagaagaagaactaaaaaggtaagaagaaaaagaaaacaaattcttattaaacaatggcaaccagactctattgttaaatgtaaaattaaaggactaggatgtttagtggcaggtgctgaaggtagacagtcttactgctacacaaatgaaataccaaactaccctcaaccaaaagcaccaggtggaggaggatttggttgtgaagttttttcattaaaatacttatatgatgaatgggtagcacatagaaatatatggacaaaatctaatgaatacaaagacttatgtagatatactggaactaaaataattttatactcacacccaacaacagactttgtatttgcttacacaagaatgccaccatttaacatagagaaatacacatattcagactttcatcctattaaactgctactaagcagacatcataaaataatactaagtaagaggtcaaaccctacaggaaaacttagacataaaataaaaattggaccacctaaacaaatgctcaccaaatggttttttcaaaaagaatttgctacagcaggtttatttcaaatgcaagcatctgcaataaacttaggctttgcttactttggtccaaacacacagagtgcactgctaaccctgtactctcttaatactaagttttacaccaatgcatcatatggtaaaactacaaatcacccatacaaaccatacaacacatatcccacaccaggactagacttttactatgacagatctaaaccatcactaaaaacaacaataacagtgagaacagacactacatatctggaaacagtaaactatagtaccggcttctttcaaaaacctgtacttaatgcctggaaagttacacaaaaagacagtccaacacctacattaaacactccagtaactgttataagatacaatccacaaacagacacaggagaaaatacaagaatatggctaacaagcatacactctgacacctgggaagcaccacaagacaaagatttaataatggcaggcagaccactatggctagccttttttggcttctggaattggatagaaaaagttaaaatgacaaaagactactttaaaactcacatatttgtagtacaatcagatgctattagaagaatttctaacacagaccaaaaagtattcccacttattgattttgacttcacacaaggtaaactaccatatgatgaatttttaacagaccaaaagaaaacattttggtacccaacagctgaaaaccaagtagtatcaataaattcacttgtagagagtggaccatatatacctaaatattccaatttaaaagagagcacttgggaacttaaatacacttatacctccttttttaagtggggcggcccagaaatccaagacacaccaatacaaaacccaggaacacagggagaatatgatgttcccgataagcagcttgaaacaatacaagttagcaacccgctcaaagaatcctgccaagcaatgcttagagcctgggactacagaaggggcattattacaacaacagctcttaaaagaatgcaaagcaacctctcagttactgaaacttaccaatctgattcagaaacaccaaagaaaaagagaaagatcacagcacaactcagaaacccccaggaagaaaacaaagaaatccaaacatgtctccactcgctcttcgaagaaagtacctgccaagacccgcaagcaagcctccagcagctcatccagcaccagcaacagcagcaagaaaagctcaagctcaacatcatacacctcctcacagacctgaagagaaaacaaagaatgatacaactacaaacaggtttcgagtagaaccattcaaagaaggctttgaaaaagacacagaaagagaactagcaatagctttttgcagaccccccagaatgtacaaaaatgaccctcccttttatccatggttacctatatgtcccaaagtacaatttaacctaaactttaaaggctaggccaacaatgtacacttagtaaagcatgtttatatatgtttgcaccccaaaaaaaatgtaaaaataaaaaaaaaaaa

SEQ ID NO: 4979 - protein, 660 aa, Gammatorquevirus sp.
MPFWWNRRRKPWYTTWRKRRRLFWNKRRKRTHRRRKPRRFTRRRRRRRRTKKVRRKRKQILIKQWQPDSIVKCKIKGLGCLVAGAEGRQSYCYTNEIPNYPQPKAPGGGGFGCEVFSLKYLYDEWVAHRNIWTKSNEYKDLCRYTGTKIILYSHPTTDFVFAYTRMPPFNIEKYTYSDFHPIKLLLSRHHKIILSKRSNPTGKLRHKIKIGPPKQMLTKWFFQKEFATAGLFQMQASAINLGFAYFGPNTQSALLTLYSLNTKFYTNASYGKTTNHPYKPYNTYPTPGLDFYYDRSKPSLKTTITVRTDTTYLETVNYSTGFFQKPVLNAWKVTQKDSPTPTLNTPVTVIRYNPQTDTGENTRIWLTSIHSDTWEAPQDKDLIMAGRPLWLAFFGFWNWIEKVKMTKDYFKTHIFVVQSDAIRRISNTDQKVFPLIDFDFTQGKLPYDEFLTDQKKTFWYPTAENQVVSINSLVESGPYIPKYSNLKESTWELKYTYTSFFKWGGPEIQDTPIQNPGTQGEYDVPDKQLETIQVSNPLKESCQAMLRAWDYRRGIITTTALKRMQSNLSVTETYQSDSETPKKKRKITAQLRNPQEENKEIQTCLHSLFEESTCQDPQASLQQLIQHQQQQQEKLKLNIIHLLTDLKRKQRMIQLQTGFE

SEQ ID NO: 4980 - protein, 118 aa, Gammatorquevirus sp.; identical to SEQ ID NO: 4574

SEQ ID NO: 4981 - protein, 108 aa, Gammatorquevirus sp.; identical to SEQ ID NO: 4575

SEQ ID NO: 4982 - DNA, 2511 bp, Gammatorquevirus sp.
tctaggggcaactcgggctagggcagtctagcggaacgggcaagaaacttaaaattatacttcttttacagatgcaaaacctttctgcagctgacttctttaaaccaactcactttaacacagatactaaaaatcaaatatggatgtctataattgctgattcacatgactctatctgccactgcaacagtccttttggccatctgcttgcttctatttttcctcctggtcataaagaccgtgacctcaccattaaccaaattcttaaaagagactttctacaagaatgccattctggtggaaaagaaggagaaagccctggtacggccgctgggggtaccggaggaggtttcaaaggcgcaaacagactgggagaagacgcagaagaagatttaccaagagaagaactagaagagcttatcgccgccgcagaaagcacaaggtaagaagaaagaaaaaaaagattgttattcaacaatggcaaccagaaagtatcacaaaatgtaaaattataggatactcaactctagtactaggtgcacaaggcactcaatttttatgctggactaatgaaatgctagaatatactcaaccaaaagctccgggaggaggagggtttggtagtgaacttataacattagaatggctgtataatcaatatgttgcacacaacaacatatggacaagaagtaacaaaaacaaagacttagccagatacacaggaggtgttcttaaactttttagacaccccacaacagactttgtttttagttatagcctatctcctccatttgatttaacaaaatacacatacactgatatgcaaccacaaaacctactattaagaccacacaaaagaattatctacagtaaactatcaaaaccatggggtaaacaatatgtaaaaattaagattaaacccccaaaacttatgtctactaaatggttttttcaatcacaaatttctgaaacaccactagtacttttacaagcggctgcagccaactttagattccctagaataggtccaaaatcacaaaatcaaatgctaactttatactacttagatacaactttttatacacattgcaactgggcacaatcatcaactgagagatacatgccagcagaacaatcagcacaatatgaaattacatacaaaacaaaaacaggtaatcagacaataaagttaccaggaactcagattactagctatgcaacatcaatacacagagacactggttggtttagaccagaagttcttaatgctattgaaattaaaaaggatggacacaaatatgggaacagaccaatatatataggaagatataacccaaacgatgatgacggtccaggcaatgaggtctatgcagtttcagttttacaaagcaaatattctccaccatcatttcaaacagacttactaatatctaaccaacccctatggatggccttctatggcttctacagctttctaaaacaaacacttaaagacaaattttttacagaacactacatgttcatagtaaaaagttcagccataaaaccagtaggtacttcagtcacccaaacattctatccactactagactttgactttgtacaaggaaaactaccatgggaagaatacttatcagaacaaattaaaaacttttggtatccaaaagccttatttcaacaacagaccattaatagtattgttgaatgtgggccatacatacctagatattccaacataccagatagtacctgggaactacagtacaattacaaactattttttaaatggggtggtccacaggcacttgaccaaccagtcgacgatcccaaagacaaacatgaatatcccactcccagtaaccactcacaagcaatacaaattggaaacccagcaaaacaaacacctgaatccattctccacaactgggacttcagaaggggaattgttacacaaacagctcttaaaagaatgtcagaaaacatccaaactgatacaactttcgaccctgatgacacagaatcacccaaaaagaagagaagaaagacaaaggagatgccactcccacaagagaaagaaaaagaactcaagacctgtctcctctcactctgcgaagaaaatacctgccaagaaaccccagaaaacctccagcagctcatccagcagcagcagcagcaacagcagcaactcaagcacaacatcctccagctcatgacccacctaaagaaacagcaacgctatttgggaatgcaaacaggcattctagaataagaaaatttaatcctggtcatgaatgggaaactgaagtacaatgtgctaaagcatttcacagaccaccaagacatttcttttcagatacccctttctacccttggcttcctatttgtccccttgtaaattttaaccttaactacaaatgctaggcccacaatgtacacttagtggtggatgtttaataaagtttgcccccaaaaaaaaaaaaaaaaaaaaaaataaaaaattgcaaaaattcg

SEQ ID NO: 4983 - protein, 660 aa, Gammatorquevirus sp.
MPFWWKRRRKPWYGRWGYRRRFQRRKQTGRRRRRRFTKRRTRRAYRRRRKHKVRRKKKKIVIQQWQPESITKCKIIGYSTLVLGAQGTQFLCWTNEMLEYTQPKAPGGGGFGSELITLEWLYNQYVAHNNIWTRSNKNKDLARYTGGVLKLFRHPTTDFVFSYSLSPPFDLTKYTYTDMQPQNLLLRPHKRIIYSKLSKPWGKQYVKIKIKPPKLMSTKWFFQSQISETPLVLLQAAAANFRFPRIGPKSQNQMLTLYYLDTTFYTHCNWAQSSTERYMPAEQSAQYEITYKTKTGNQTIKLPGTQITSYATSIHRDTGWFRPEVLNAIEIKKDGHKYGNRPIYIGRYNPNDDDGPGNEVYAVSVLQSKYSPPSFQTDLLISNQPLWMAFYGFYSFLKQTLKDKFFTEHYMFIVKSSAIKPVGTSVTQTFYPLLDFDFVQGKLPWEEYLSEQIKNFWYPKALFQQQTINSIVECGPYIPRYSNIPDSTWELQYNYKLFFKWGGPQALDQPVDDPKDKHEYPTPSNHSQAIQIGNPAKQTPESILHNWDFRRGIVTQTALKRMSENIQTDTTFDPDDTESPKKKRRKTKEMPLPQEKEKELKTCLLSLCEENTCQETPENLQQLIQQQQQQQQQLKHNILQLMTHLKKQQRYLGMQTGILE

SEQ ID NO: 4984 - protein, 124 aa, Gammatorquevirus sp.
MQNLSAADFFKPTHFNTDTKNQIWMSIIADSHDSICHCNSPFGHLLASIFPPGHKDRDLTINQILKRDFLQECHSGGKEGESPGTAAGGTGGGFKGANRLGEDAEEDLPREELEELIAAAESTR

SEQ ID NO: 4985 - protein, 109 aa, Gammatorquevirus sp.
LSPLTLRRKYLPRNPRKPPAAHPAAAAATAATQAQHPPAHDPPKETATLFGNANRHSRIRKFNPGHEWETEVQCAKAFHRPPRHFFSDTPFYPWLPICPLVNFNLNYKC

SEQ ID NO: 4986 - DNA, 2511 bp, Gammatorquevirus sp.
cgggagcccgaggtgagtgaaaccaccgaggtctaggggcaattcgggctgggcagtctagcggaacgggcaagaaacttaaaactatttgttttttagatgaacaacctgacagcaatagacttctacaaaccacctccatacaatactgaaactttaaatcaaatatggatgtcccagataagtgattctcatgacatttggtgcaactgcaacggtcctttcgctcatctgcttgctagtatttttcctcctggtcacaaagaccgtgatctcactgtgtctcaaattattaaaagagactacaaacagtcatgcctttctggtggaaaagaagaagaaggccctggtttggcagatggaggtaccgccagcgccgctaccgccgcagaaacaagacctatagaaggagaagaagaagactacccaggagacgaaatagaacatctactcgccgccgctatagaagaaagcgcaaggtaagaagaaaacaaaaaaaaattccaatacagcaatggcaacctgatagaattgttaaatgtaaaattaaaggatattcttgcttagtacttggagcagaaggcagacaaatgtactgctatacaaatgaagctaaagaatatttgcagccaaaagccccagggggaggtggttttggtactgaagtatttactttaaaatggctatttcaagaatggcaatcacataataacatatggacaaaaactaatgaatacactgacctttgcagatacacaggaacaaaaataatactatatagacatcctacagtagacttcattttttcatatgaaagaatgccaccatttgaaataaataaatttacatacccagaccttcaacctcaaaacatgctactacacaaacacaaaaaaattattcttagcagaagatcaaatccccgaggaaaaattaaacatattatacatataggaccccctaaacaaatgataacaaagtggtttttccaaagaaatttttgtgatgcacacctatttagaatttcagccacagcctgcacttttgaatacccaagatatgcaaagggcagtgccagcaacattcttacagttccctcattagatacttttttttatgcaaacagtgactgggcccacacacacaatggaccatacctcaatattaacacagcaccagcaaactattattttaaatacagagatagcagaggcatagaacaaaaaggcacatatcaaaaaccaacaggtacatcagaaacagcatactatcaaagtgtaaattacaacacaggtcttttccaaagtaatttacttaaagctcatttcataagttctactagtcacacaggcccctcacaagcagtactaccaattatatacttaagatataacccacatgaagacacaggccatggaaacgaagtttatttaacttcagtatttaatggaaattacaacaagccaggacccagtgcacctgatttatcatttaatggtgtgccactgtggatggcattttggggatactataattatttactaatatctacagcaaacaaaggcctgtaccttacacatatgtttgtagttaaatcaccagcactacgcccactatcacaagctactgaacaaaaatactaccccatactagatatggattttataaatggaaaattaccatggggtgaatatttatcagaaaaccaaaaaaaactgtggtacccaactgcagaaactcaaacacaaattattaatgccatagtatgtactggcccatatgttcctaagctaaacaaccagccagatagcacttgggaactaccttacagatatatttcttattttaaatggggtggtccccaaatacaggaccaaaacgtggacgacccctgtgccagaaaaacatacaatgttcccgatacaatcaaacaaacagtacaagtgcatgacccggcaaagctacacccagaaaccatcttccatgactgggactacagacggggtatcattacacaaacagctattaaaagaatgtcagaaaacctcgaaattgattcaattatctcatctgatgactcagaatcaccaccaaaaaaaaaggaaaatcaccaaagagttgcccagtgccaatcaaaaagagcaagaaatcaagaaatgtctcctctcactctgcgaagaacctatctgccaagaaacaccgcaaacacttcagcagcacatccagcagcagcagcagcagcagcaacagctcaaaagaaacctcctgtacctcctcaacaacctaaagaaaacacagagaaatatggaactacagacaggaatcctagaataagaagatttaaaccaggatttgaagaagaaacagaacgagaactagcaagaatatttaaaagaccaccaagaacatatacatgtgaccccccattttacccctggttacctataacacccaaagtctgctttaaccttaatttcaaattctaggccaacaatgtacacttagcctggg

SEQ ID NO: 4987 - protein, 723 aa, Gammatorquevirus sp.
MPFWWKRRRRPWFGRWRYRQRRYRRRNKTYRRRRRRLPRRRNRTSTRRRYRRKRKVRRKQKKIPIQQWQPDRIVKCKIKGYSCLVLGAEGRQMYCYTNEAKEYLQPKAPGGGGFGTEVFTLKWLFQEWQSHNNIWTKTNEYTDLCRYTGTKIILYRHPTVDFIFSYERMPPFEINKFTYPDLQPQNMLLHKHKKIILSRRSNPRGKIKHIIHIGPPKQMITKWFFQRNFCDAHLFRISATACTFEYPRYAKGSASNILTVPSLDTFFYANSDWAHTHNGPYLNINTAPANYYFKYRDSRGIEQKGTYQKPTGTSETAYYQSVNYNTGLFQSNLLKAHFISSTSHTGPSQAVLPIIYLRYNPHEDTGHGNEVYLTSVFNGNYNKPGPSAPDLSFNGVPLWMAFWGYYNYLLISTANKGLYLTHMFVVKSPALRPLSQATEQKYYPILDMDFINGKLPWGEYLSENQKKLWYPTAETQTQIINAIVCTGPYVPKLNNQPDSTWELPYRYISYFKWGGPQIQDQNVDDPCARKTYNVPDTIKQTVQVHDPAKLHPETIFHDWDYRRGIITQTAIKRMSENLEIDSIISSDDSESPPKKKENHQRVAQCQSKRARNQEMSPLTLRRTYLPRNTANTSAAHPAAAAAAATAQKKPPVPPQQPKENTEKYGTTDRNPRIRRFKPGFEEETERELARIFKRPPRTYTCDPPFYPWLPITPKVCFNLNFKF

SEQ ID NO: 4988 - protein, 127 aa, Gammatorquevirus sp.; identical to SEQ ID NO: 4493

SEQ ID NO: 4989 - DNA, 2511 bp, Gammatorquevirus sp.
aaaaaaaaaaaaataaaaaattgaaaaaaggtctaggggcaattcgggctagggcagtctagcggaacgggcaagaaactaaaataatatttttattttagaatgtcaagattctacaagaaaacaccatacaatgctactaccatagagcaaatgtggatgtctactgttaatgattttcatgatagtttctgctcttgctggcatggctttgctcatatgctagacctaatattccctgaaggccatacagacagagacaaaacaattaaagaaattattgacagagacatacaatgcctttctggtgggcaagaagaaaaaggccatggtttggcagaagaaattactttaagaggagacgccgctacacacgccgccgccgcagaagaagaattccaagaagaagatatagacgctctcgtttcagccgtagaacacgcagaaagaaggtaagaagaaaaaagaaaaaaatacctgtacaacaatggcaaccagacagcattagaaaatgtaaaattataggatataatgctttattatatggagctgaagggacacagtacctgtgctataccaaccaaagatttgtgctaacacctccacaatatggaggtggaggaggatttgctgtacaaacatttaccttagaatacttatatgaagaaagtaaatttagaaataatacatggacagcttctaatatcttttctgacctttgcagatacttaagagccaaagtatacttttacaggcacccaaaaatagactttgttgtaaactatcaaagacaaggcccctttgaactaaacaagtacacatatgcagcagctcatccctacatcctaatgcagtctaaacacaaaaaaattattcttagcaaaactacaaaccctaaaggaaaactttggaaaaaaattactattttaccaccaaaacaaatgctatccaaatggttttttcaaaaacaatttagtacctataacttattccaactgcaaggcgcagcagccagctttacttaccctagactaggttgctgtaatgaaaatagaattataacagtatattatttaaacccacagttttttcaacacagtacatgggcacaaactgttagtaaggcatatgttccttatgaccactataaaacccaactaactttttggtacccagaaggtaaaacacttaagtcttttacaccaggttatgttccaggcagtagccaagcagactattacagaagtatatcatatgaagaaggctttttttgcagacaggtactaacagccacaaaagtcacagacacaccaagctcacagtcaagtttagcatacttacctgtaaatgctgccagatataatccagaagaagacaatggagtaggtaattctgtatatttagttccagttaatgtaggatactatgataaaccaacagaagacaatttaatttttaaaaatgcaccactgtggctaatttttcatggatactatagcttcattgaaaaagttaaaactagcagctttatgccattacacatgtttgtaattagaagcccatttttaaaacctagaccttctgccattacaagagacttttttcccattatagacttaaactttaccataggaaacaatccctttaaagcatttatatctaaaacacaaaaaacactctggtatcctacatgtgaacaccaaactgagacaattaacagctttgttgaatcaggcccttatatacctaaactaaacaatgatagagacagtacttgggaattaccttaccattatattttttattttaagtggggaggaccaaatccaccacagcaagacatcagtgatccaaaaacaaagaacacctatattgtacccgatacaatgccgggaacaatacaaatatccaacccacttaaactatccacagaaacacttatccacaactgggacattagacgaggacaaattaaagaaaaagctcttaaaagaatatgcgaaaacacagagactgatacagatttcctcccagatcaggaacaaacaccaacaaaaaggccaagacttacaggagccctactacacccagaagaaaaaaacaaagaaatccagacatgtctccaggaactcttcaaagaagattccttccaagaaatccaagaagaccagacaaacatcctccagctcattcagcagcagcagcagcagcagcaactcaagcacaacctcataatgcttctacaagaaatgaaatacaaacaacaaatgcttcaactaactacaggtctactagattaacaagatttgctccaggctttgaagaaataactgaaagagaactagctatagctttttgcagaccccctagaacatataaagaagaccctcctttttatccctggctaccaaatcccgtaccccgtgtaaattttcatcttaactacaaattctaggccaacactgttcacttagtaaagcatgtttaataaagttttacccaaaaaaaaaa

SEQ ID NO: 4990 - protein, 667 aa, Gammatorquevirus sp.; identical to SEQ ID NO: 4933

SEQ ID NO: 4991 - protein, 117 aa, Gammatorquevirus sp.; identical to SEQ ID NO: 4934

SEQ ID NO: 4992 - protein, 112 aa, Gammatorquevirus sp.; identical to SEQ ID NO: 4935

SEQ ID NO: 4993 - DNA, 2511 bp, Gammatorquevirus sp.
aaaaaattgcaaaaattcggcgctcgcgcgcgctgggggcaattcgggctagggcagtctagcggaacgggcaagaaacttaaaacaatatttgttttacagatgtccagattctacaaagaagtaccatacaacaaagacaccaaatgtcaaatgtggatgtctatgattagtgatggtcatgatattcactgtggatgttgtcaaccatttgcacacctactagacagcatttttccagagggacacgcagacagaaacaagaccattgaacaaataatacaaagagatttacagctatgccattctggtggaacagaagaagaagaccatggtatcccacttggaggaagcgccgctacagaaacacccgctacagaaaatataaaagaagaagaagacctagacgccctgcttatcgccgccgccgccgccgtagaagatacaaggtaaggagaaaaaaaaaaagaataactatacaacagtggcagccagacaaaatagttaaatgtaaaattataggatatggataccttgtagcaggaactgaaggaaaccaatttagatgttatacaaatgataaacataactatggacaaccaaaagctccaggcggtggcggttttggctgtgaacaatatacacttgaatatttatataaagaatgggaagctcatagatgcatatggactagatctaatgactacctagacctagtaagatacacaggctgcatattttatttttatagacatcctaaaacagactttatcatatggtatgacagacaaccaccatttaaatttacaactactacttacttagaaacacatccactatccatgttactaaaaagacaccataaagtaataagatccctagaacataacccaaaaagcaaaccatatgttaaagtaaaaataccaccaccaaaacaaatgataaccaaatggtttttccaaccagactttgcagatgtaccattatttaaactctgtggatctgccagcaactttggatactcactctacggacccaatacacaaagccccaacttaaccatatatgccttaaacacagatttctatgttatacacaattgggcagattcaagcttaactactagtgggtatcaaccatacgcaggtgtacctaacagtattaaatttaaatataaaataggcaataaaacaggtgaagtaggacctccacaaaaacaatataaagagagcatttcatatgaacagggctggtttagaccagaaatattaaatgcatatgaagttactaaccatggcaaagccacatacaacagaccagtgtcaataggcagatacaatcctgaagaagacaatggtaaaggcaatagaatatggctcacaagcattatagcaaacaaaggctgggccccacctactgacaaagatttaattataggtgaaattcctctatatatggcattttggggtttgtgggactatattgctcagtctagaaaaacagaagaatacttagcagtatcaatgtttgtagttaaatctgactacataaaaatagttttaggaggcccacaccaacaagtgtggccaataatagactggtcctttatacaaggtaaaatgccatgggatgaatcccttactatacaagaaaagaccagatggtaccctacatgctacaaacaaacccaaactataaacaattttgtagaatgtggaccatactgtccaaaatatgcaaacttacctgtatctacttggcaactaccttacaaatataaattttactttaaatggggtggaccccagacaggagagaacattgttcaagatcccaaagaccaagaaaaatatcccgttcccgatactttcacagaagcaatacaaatcagagacccgctcaggcaacacccaaaaacactccttagatcctgggacttcagaagggacattgttacaaaatcagctcttaaaagaatgcaagaaaacttatcaactgatgaatctcaacaatctgatttctcagaaacaccaaaaaagaaaaagaaagtcacaacagagatcccatgcagcgaccaagaagagaaggacctccaaacatgtctcctctcactctgcgaaaaagataccttcccagaagagacagaagacctcaagcagctcatctaccagcagtatcacaagcagcaacagctcaagaacaacctctacaagctcctcaaaaacctaaagaaaacccaagcacacctgcaaatgcaaacaggcatgcattaacccgctttaaaaaaggctttgagtgggacactgaactagaactagcttcagcatttaacagaccacccagactttttaaagaagactcccctttttacccctggttacccaaaccaacacctattgtaaactttcaccttaattacaaattctaggcctacactattcacttagtggtgtatgtttatataagtcacacccccaaaaaaattgtaaaataaaaaaaaaaaaaaaaaat

SEQ ID NO: 4994 - protein, 657 aa, Gammatorquevirus sp.
MPFWWNRRRRPWYPTWRKRRYRNTRYRKYKRRRRPRRPAYRRRRRRRRYKVRRKKKRITIQQWQPDKIVKCKIIGYGYLVAGTEGNQFRCYTNDKHNYGQPKAPGGGGFGCEQYTLEYLYKEWEAHRCIWTRSNDYLDLVRYTGCIFYFYRHPKTDFIIWYDRQPPFKFTTTTYLETHPLSMLLKRHHKVIRSLEHNPKSKPYVKVKIPPPKQMITKWFFQPDFADVPLFKLCGSASNFGYSLYGPNTQSPNLTIYALNTDFYVIHNWADSSLTTSGYQPYAGVPNSIKFKYKIGNKTGEVGPPQKQYKESISYEQGWFRPEILNAYEVTNHGKATYNRPVSIGRYNPEEDNGKGNRIWLTSIIANKGWAPPTDKDLIIGEIPLYMAFWGLWDYIAQSRKTEEYLAVSMFVVKSDYIKIVLGGPHQQVWPIIDWSFIQGKMPWDESLTIQEKTRWYPTCYKQTQTINNFVECGPYCPKYANLPVSTWQLPYKYKFYFKWGGPQTGENIVQDPKDQEKYPVPDTFTEAIQIRDPLRQHPKTLLRSWDFRRDIVTKSALKRMQENLSTDESQQSDFSETPKKKKKVTTEIPCSDQEEKDLQTCLLSLCEKDTFPEETEDLKQLIYQQYHKQQQLKNNLYKLLKNLKKTQAHLQMQTGMH

SEQ ID NO: 4995 - protein, 148 aa, Gammatorquevirus sp.
LQKFGARARWGQFGLGQSSGTGKKLKTIFVLQMSRFYKEVPYNKDTKCQMWMSMISDGHDIHCGCCQPFAHLLDSIFPEGHADRNKTIEQIIQRDLQLCHSGGTEEEDHGIPLGGSAATETPATENIKEEEDLDALLIAAAAAVEDTR

SEQ ID NO: 4996 - protein, 120 aa, Gammatorquevirus sp.; identical to SEQ ID NO: 3974

SEQ ID NO: 4997 - DNA, 2510 bp, Gammatorquevirus sp.
tagccacagtgggacattgtctatttctagttgttggggcaattcgggctagggcagtctagcggaacgggcaagaaacttaaaatatatatttttttacagatgtctaccctgtttaaacctacaaaatacaatgcatgtaccaaaaatcaactatggatgtcaataataagtgattctcatgatattcactgtggatgtgaagtgccttttagtcacctacttgacagcatatttccagaaggacacagtgacagacacaaaacaatagaagaaattattaaaagagatactgaatcatgccattttggtggtacagaagaaaaaagccatggttttacaacaatcaaagaagaagatataaaaagagatggagaagaaaaccaagaagaagaccttatagaagacgccgcgttacaagaactaatcgccgcaggagaagacgccataggaaggtaaggaaaaaaagaaaaaccttacctgttagacaatggcagccagactgcattagaaactgtaaaataagaggcttctcagccctagtagtaggagcagaaggaactcaaatgtactgttatacagaagagaaatttaactatgttccaccaaaagttccatggggagggggaataggagtagaaaactatacacttaaatacctatatgaagaattaattttccataacaatttttggacaacttcaaatgttatgctagacctatgtagatacataagatgtaaaataatacttttcagacactcaaaccaagactttgtaatttcatatgatagacaaccaccttttaaattaacaaagtggacatatcctagctgtcacccacatcagctactactacaaaaacacaagaaaatactacttagccttaaatcaaaaccaaatggcaaatactataaaaagcttatcattaaaccacctaaacaaatgctcacaaaatggttttttacaaaaagcttttgtaatgagtcactattcctactaaaaggtgcggcagcaaactttagaaactcatacttaagtgcatccaatgaaaacaggctagttaatatcatgtcacttaacacacagttttatcaacactctgactgggcacaagctagaggatctgaaaacgcatacttaccatataacaatgccccactaaacatgaagtacaaagttaaagataaaagtggtgctgttaaagactttacaatgaatataacaaattatcaaaccagcatacaatatgacactggctggtttaaatccagctttttacaagcatttgaaattcctatacaaaaaacacacgcagcaaccatacccatgttaatagccagatacaacccaaacaaagacacaggagagggcaacaaaatatttataaaatctgttctatcagatggctggaaaccaccatccactgacaaacaactagaaatagacaatgtcccactgtggctaggcttacttggatttttatcatatgttaaagaaaccaaaaatgtagactacttaaaatcctcagtagtagttcttaaaagcactgcaatacactgctccagtcaaataggaagctgtgacctatactgtcccatagacacagaatacatactaggcaaaaaaccatatgaacaagttattactcaaacagaaaaaaacttgtggtacccaacaacacaatggcaactaaaaacattaaatgcaatagtagaatcaggaccatacataccaaagctatcagaagaaaaagaaagtacatgggaactaaaatatatgtacaattttttctttaagtggggaggaccacacactccagacaaagaaattacaaatccagaaaactttaacacctatgatgtacccgatactatcacaaggtcaatacaaattaccaacccagaaaaaaacacaacagaaacaatactacacccctgggacttcagaaggggcattgttaaagaatcagctcttaaaagaatgtgcgaccacctcgacactgatacagaatttcaattctctacagaagaagctccaaagaaaaagagaaagatccagggagcagcactgcaacacccccagaaagaaacagaagaaatctaccactgtctccatggtctctgcgaaaaaagttcattcccacaagaagaagaaaagacactcgaagcactcatccagcagcagcagcagcagcaggagctactcaagtacaacatcctccagctcctgatggatctaagagaaagacagaaacagcttcaactacacacaggaatgttacattaacaagatttaaagtaggctttgaacaagacacagaaaaagaactgtctatagcattttgcagaccccctagaacttataaagaagaccctcccttctatccctggcttcccaagcttgaacccctggtaaactttcacctaaactttaaaggctaggccaacactattcacttagacaagcatgtttatataagcacaaccctaataaaaatccaagtaagcc

SEQ ID NO: 4998 - protein, 662 aa, Gammatorquevirus sp.
MPFWWYRRKKPWFYNNQRRRYKKRWRRKPRRRPYRRRRVTRTNRRRRRRHRKVRKKRKTLPVRQWQPDCIRNCKIRGFSALVVGAEGTQMYCYTEEKFNYVPPKVPWGGGIGVENYTLKYLYEELIFHNNFWTTSNVMLDLCRYIRCKIILFRHSNQDFVISYDRQPPFKLTKWTYPSCHPHQLLLQKHKKILLSLKSKPNGKYYKKLIIKPPKQMLTKWFFTKSFCNESLFLLKGAAANFRNSYLSASNENRLVNIMSLNTQFYQHSDWAQARGSENAYLPYNNAPLNMKYKVKDKSGAVKDFTMNITNYQTSIQYDTGWFKSSFLQAFEIPIQKTHAATIPMLIARYNPNKDTGEGNKIFIKSVLSDGWKPPSTDKQLEIDNVPLWLGLLGFLSYVKETKNVDYLKSSVVVLKSTAIHCSSQIGSCDLYCPIDTEYILGKKPYEQVITQTEKNLWYPTTQWQLKTLNAIVESGPYIPKLSEEKESTWELKYMYNFFFKWGGPHTPDKEITNPENFNTYDVPDTITRSIQITNPEKNTTETILHPWDFRRGIVKESALKRMCDHLDTDTEFQFSTEEAPKKKRKIQGAALQHPQKETEEIYHCLHGLCEKSSFPQEEEKTLEALIQQQQQQQELLKYNILQLLMDLRERQKQLQLHTGMLH

SEQ ID NO: 4999 - protein, 142 aa, Gammatorquevirus sp.
LLGQFGLGQSSGTGKKLKIYIFLQMSTLFKPTKYNACTKNQLWMSIISDSHDIHCGCEVPFSHLLDSIFPEGHSDRHKTIEEIIKRDTESCHFGGTEEKSHGFTTIKEEDIKRDGEENQEEDLIEDAALQELIAAGEDAIGR

SEQ ID NO: 5000 - protein, 111 aa, Gammatorquevirus sp.
LSPWSLRKKFIPTRRRKDTRSTHPAAAAAAGATQVQHPPAPDGSKRKTETASTTHRNVTLTRFKVGFEQDTEKELSIAFCRPPRTYKEDPPFYPWLPKLEPLVNFHLNFKG

SEQ ID NO: 5001 - DNA, 2510 bp, Gammatorquevirus sp.
ggggcaattcgggctagggcagtctagcggaacgggcaagaaacttaaaacaatttcttttacagatgtcatatttgtttcaaccaactcaatacaacaatgaaactaaagaacaactgtggatgagtatttttgcagactcccatgactccatttgtgaatgccctacaccatttgcacacgctctttggtgtatgtttccagaaggccacaaagatagaaatttaaccattgcccagataataacaagagatacagcactatggcattctggtggtacagaagaagaaaaccatggtttggcagatggagacgcaaacctaccaaaaaatacagaacaaccaccagaagaagaaaaagaagactcccttggagacgtagaaatagaagaacttatcgccgccgcagacgacgccattacaaggtaagaagaaaaaaaagaaaaattacaatacagcaatggcagcctgaaagcataaaaaaatgtaaaattaaaggtacaggacagctagtactaggagctgaaggaacacaatacagatgctttactgttcataaaaatgaatggacaaatcctaaggttgcaactggtgggggatttggagttgaactgtttactctaaattacctctacaaagaatacctagctaaaaacaatatatggacagcttcaaatatttacaaagacttttgtagatacactggctgcagcataaccttatttagacatcctcatacagattttattttttgctatgacatacagccaccattcacaattcacaaacacacatacatgatggcacacccacactttttactgcaaagaaaaagaaagaaaattttacttagcactctaacaaaacctaatggtaaactaacaaaaaaaattaaaataaaacctccaaaaatgctacagacaaaatggcatttccaagaagaatttgcagactttggactagttactttaatagcttcagcatgcaactttagacatccatggcttgcctgctgcaatgaaaatttattaataacactatattacctacaaccaacattttggtcacattcagaatgggcacaatattctagagacgcatacaaccccagaggacacgtaaaccccatgaaaaatgatttaacatataaaggtgaacttaataataaaccttatgaatataaaatgcaaaaatttaaccctaacacatatgaagaatcactaaacaaagattcaggctggtttaatccaagagtactaaatgcacacacagttttggatggctcagcaagacaatcactagtaccctgtggtgtgctaagatataacccatacatagacacaggtgaaaaaaacaaactatatgtttgtagtgtactagtgggttcatggactgaaccaaaagaccaagaccttatactagaaaattatcctctttgggctatgttttttggatttacatcctacttaaaacaggttaaatctaaaactgtaccactaaatggatctatgctagtagtaaaatctccagctctacacagggtctttggagaagatacaaaagacttttacccactaatagacaaatctttcatgcaaggcagaggcacaaacttcacagaccctatactgcctaaagcaaaactttggtatccagcagtatttgcccaaagagacagcatagcacaaatagttaactgtgggccctacctaccaaaatacaatgaagttaaagaaagcacatggcaattaaactttttttacaacttttattttaagtggggtggatcatacccaccacaacaagaagcagaaaatccaaaggacaaaggtacctatcctatacccaatacacagcaagaaacaatacaaattgaaaaccctcttaaacaaaaatacagcacaatatttaaaccctgggactacagaagagggaccattacaaaaacagctcttaaaagaatgtatgaaaacctctcggatgatgaatctttatcaacagattcaacaatctcaacctctccaaaaaagaaaaagctactcccaacactccaagacccgaaaaaagaaagacaagaaatccagacatgtctccgctcactctgcgaagaaagttccttccaagaaacacaggagaacgccaacctcttccagctcatcaaaaaccagcacaagcaacagcagcagctcaagtacaacttactaacattgatttcagatttgaaagtgaaacagagaaaccttttacatcaatcagggtttctagcctaaatatattcaaaccaggctttgaatatgacacagaaaaagaaatgtcaatagcctttaaaagaccaatgagaaaatataagcatgatccccccttttacccatggttaccccctgctcccaaagtctgtttcaacctaaattacaaagactaggccaacaatgtacacttagacaagcttgtttaataaagttgtacccaaaaaaaaaaataaaaaaaaaaaaaaaaaaaaaaataaaaaat

SEQ ID NO: 5002 - protein, 668 aa, Gammatorquevirus sp.
MAFWWYRRRKPWFGRWRRKPTKKYRTTTRRRKRRLPWRRRNRRTYRRRRRRHYKVRRKKRKITIQQWQPESIKKCKIKGTGQLVLGAEGTQYRCFTVHKNEWTNPKVATGGGFGVELFTLNYLYKEYLAKNNIWTASNIYKDFCRYTGCSITLFRHPHTDFIFCYDIQPPFTIHKHTYMMAHPHFLLQRKRKKILLSTLTKPNGKLTKKIKIKPPKMLQTKWHFQEEFADFGLVTLIASACNFRHPWLACCNENLLITLYYLQPTFWSHSEWAQYSRDAYNPRGHVNPMKNDLTYKGELNNKPYEYKMQKFNPNTYEESLNKDSGWFNPRVLNAHTVLDGSARQSLVPCGVLRYNPYIDTGEKNKLYVCSVLVGSWTEPKDQDLILENYPLWAMFFGFTSYLKQVKSKTVPLNGSMLVVKSPALHRVFGEDTKDFYPLIDKSFMQGRGTNFTDPILPKAKLWYPAVFAQRDSIAQIVNCGPYLPKYNEVKESTWQLNFFYNFYFKWGGSYPPQQEAENPKDKGTYPIPNTQQETIQIENPLKQKYSTIFKPWDYRRGTITKTALKRMYENLSDDESLSTDSTISTSPKKKKLLPTLQDPKKERQEIQTCLRSLCEESSFQETQENANLFQLIKNQHKQQQQLKYNLLTLISDLKVKQRNLLHQSGFLA

SEQ ID NO: 5003 - protein, 120 aa, Gammatorquevirus sp.
MSYLFQPTQYNNETKEQLWMSIFADSHDSICECPTPFAHALWCMFPEGHKDRNLTIAQIITRDTALWHSGGTEEENHGLADGDANLPKNTEQPPEEEKEDSLGDVEIEELIAAADDAITR

SEQ ID NO: 5004 - protein, 111 aa, Gammatorquevirus sp.
MSPLTLRRKFLPRNTGERQPLPAHQKPAQATAAAQVQLTNIDFRFESETEKPFTSIRVSSLNIFKPGFEYDTEKEMSIAFKRPMRKYKHDPPFYPWLPPAPKVCFNLNYKD

SEQ ID NO: 5005 - DNA, 2510 bp, Gammatorquevirus sp.
gtattttaagtttcttgcccgttccgctagacctaggggcaattcgggctagggcagtctagcggaacgggcaagaaacttaaaatacttttttttttacagatgttcaacagttctgactttatcaaaaaaactaaatataactctgacaccaaaaatcaactttggtgctctgttatagctgattcacatgactcctggtgtggatgtgaaacaccctttgcacatctactagcatccatatttccaccaggacacaaagatagaaaacttacaattgatgatatattaaaaagagattatctagaatgccattctactggaaaagaagacgcagaccctggtatggtgcctggtaccgccgccgccgccgcagaccctggagatggccacaaaaaagaaggaggatacgtagaagacgcagagctagaagaacttataaaggcaggagaagacatcaaagaaaggtaagaagaaagaaaaagagactaaccttacatcaatggcaaccagaatctattagaaaatgtaaaataaaaggcctaggccttttagttttaggtgcagaaggcactcaaatgaactgttatactactaacaaatttgactatgttccacctaaagttccatatgggggaggatttggtactgaactgtactcattagaatatttatatgaagaatatacactgcacaacaatatctggacaacaagtaatattggattagacctatgtagatacacaggaggcaactttatattttttagacacccagacatagacttcatagtgacctatacattaagcctacctataacaatagacaaatatacatttccagccatacatccacatcaaatgcttctagacaaaagacatagggtaatatttagccaaaaaagcaaaccaaatggaaaatactatgttaaaattaaatttaagcctccaaaacaaatgataaacaagtggttttttacacagcaattttcaaaataccaacttatatttttaaaagctacagcagttaactttagatactcatttttaactgaaacatcacaaaacttactagtaaacattgtttcacttaatcccagcttttaccaaaacaaacactgggatcaagcacaactacacgaaaatccatacaaaccatacaataatgtaaaaaacaatatgacatttaaatatagagtaaagggagaagagagaactaaactatatccaccaccagatctatcatacacacaaagcataaacaaaaatactgggtggtttcaacctataatattacaggcatatgaagtactaagtggagtaacacctcaagcagtaacaccaactatagctggtagatataatcccacaaaagactcaggaacaggcaacatactatttatatcatctactcttacagaagactggcaaccacctaatgataaagcacttaaaatagaaaatgtaccactgtggttggctgcatttggatttctttcttatataaaaacaattaaaacagaagagttctttggatcacatttagtagttcttaaatccactgcaattcactgttccacacaagtaggatcctgtaattactatgctcccttagacattgaatatatacaaggtaaaaaaccttttgaccaaccaatcttacctagtgaagctgccaaatggactccaaatataagatggcaactaaaagccttaaactctatagtggaaagtggtccctttataccacaactaaatgaacaaaaaaatagcacatgggaactaaaatatttatacaaattttactttaagtggggaggacccagaggcactgatgcacagattacagacccatcacagctaccaaccgccgatgtgcccgataaaatcttcaaaacagtacagattgtcaacccaacaaaacaaatacctgaaacaattatccacccctgggactacaggagaggtatcattacaaaaacagctattaaaagaatgtgcgagcacctccaaactgatacagactttgaaatctctgaaacagaaactcccaaaaagaaaaagaaaatcaaaggagcagctctccaaaacccagaggaagaattccaagagctacaagcctgtctccaggatctctgcaaagaaaatatctaccaaacaccagagacagacctccagcagctcatcctccaacagcagcagcagcagagagagctcaaatacaacctcgtccagctcctcgtagatctaaaacaacaccagaaccaactacagttacaaacaggactattcacctaactagatttaaacctggatttgaacaagaaacagaaagacaactagctattattttctgcagaccccctagaacatacaaagaagatcccccattttacccctggttacccccagaacccaaagtaaactttgaacttaattttaaatactaggccaacaatgtacacttagtaaagcatgtttaataaagttacaccccaaaaaaaaaaaaaa

SEQ ID NO: 5006 - protein, 662 aa, Gammatorquevirus sp.; identical to SEQ ID NO: 4474

SEQ ID NO: 5007 - DNA, 2510 bp, Gammatorquevirus sp.
aattgtaaaaataaaaaaaaaaaaaaaaaggtctaggggcaattcgggctagggcagtctagcggaacgggcaagaaacttaaattaaacttttttttcagatgagtaaattttttactccaacaccttacaacaatgaaactaaaaaccaaatgtggatgtccatgatagcagatggccatgatatttgctgtggatgccctcaaccttttgctcacctactagacagcatatttccagacggccacacagacaggtacaagaccattcactacattataaacagagactataaactatgccattctggtggagaaggagaagaaagccatggtatggccgctggagaagaaaaagatttaccaaccgtcaaaagagaagaagaagatactataccagaagatggaaacgtagaagaactactcgccgccgtagaaaacgccgaggcaaggtaagaaaaaagaaacaaactataactgttaaacaatggcagccagatagaattgtactatgcaaaattaaaggatttggagaacttgtattgggagcagaaggaacacaatttcaatgctatacaaatgaaaagtatactacaccaagaccattaaaccctgggggaggaggctttggaatggaaagatttaccttagaatacctatataagcaacacatatttagaaacaacatctggaccaaaagcaataactggacagacctctgcagatacctaagagctactttttacttttatagacacccacatcaagactttattgtaagatatagcagacaacctccatttaacattgataaaacaacatatccagcacaacacccactacttatgctattaacaaaacatcataaagtagtacctagtttaaaaagaaaaccaagaggcaaaccatatgttaaagtaactattaaacctcctaaacaaatgctaacaaaatggttttttcaaaaacaatttgcagagtatgacctgctacaaatagctggaactgtatgctcttttgattaccctagaataggctgctgtagtgaaaacagagtcattacaatatattatttacacccaggatttttcaacgactcctcctggggacagaatacaggtgccacaccatacagaccttatccaacattagatccaaaaaaatacaaattttactcaaaatatgccccaactgcaggttacacaccagattttagccaaggtactggagaacacgacccctactataaaagtattaactgggacggtgggtggttttcacccaaaatattacaagccactagatatacatacgatggagaagaaaaagctcctttaccattaaatgcagctagatacaatccagctgaagatgatggaataggcaatgaaatatggctaagtagcataacctcccacacttatcaaaaacccagagatccagtattaatttttgacaacacaccactgtggctagctttttttggctttactaactatatagaaagattaaaagacaagagtttattccaactcagcttgtttgttattaaaagccgctacataaaaccaggacctacagcacaaacacaagcctactttccttttgtagattataactttacaataggaaaaaatccaaaagaaagctacctaacatacacagacaaaaaactatggtaccccacagtttttagacaactacaaaccataaattcaattgtagaaacaggcccatatgtgcctaagttacaagcagacagagacagtacctgggaactaccttacaaatacattttttcctttaagtggggtggaccacttatcacagaccaagaaatatcagatcccaagaacaaagacgagtatcctgtacccgatacaatgcaaaaggcaatacagatatgcaacccaaaacatcaagacacatccacaatcttccatgagtgggattacagacgaggctacattacaaacccagctattaaaagaatgtcagaaaacctcatcattgattcagatgtctcatcagatgcagaaactccatcgaaaaagagaaagagagttacagcagagctcagaaacccggaggagaaagtcaagaaaatcaaaaaatgtctcctctcactctgcgaagagcatacatgccaagaagaggaggaagagacagacctccaccagctcatcctcaagcagcagcaacagcagcagcaactcaagcacaacatcttaattctactgaaagatatgaaagcaaaacaaaagatgcttcaactacaaacaggagtcctagagtaaaactaacaccttttaaaaaagggtttgaaatggacacagaaaaagaactagcacaagcatttaacaggccccctagaatgtttaaagaagacacccctttttatccctggttaccaaaacctgtaccccttgtaaactttcaccttaattttaagttctaggcctacaacactcacttagtggtgtatgtttatataagtttgcaccccaaaaa

SEQ ID NO: 5008 - protein, 665 aa, Gammatorquevirus sp.
MPFWWRRRRKPWYGRWRRKRFTNRQKRRRRYYTRRWKRRRTTRRRRKRRGKVRKKKQTITVKQWQPDRIVLCKIKGFGELVLGAEGTQFQCYTNEKYTTPRPLNPGGGGFGMERFTLEYLYKQHIFRNNIWTKSNNWTDLCRYLRATFYFYRHPHQDFIVRYSRQPPFNIDKTTYPAQHPLLMLLTKHHKVVPSLKRKPRGKPYVKVTIKPPKQMLTKWFFQKQFAEYDLLQIAGTVCSFDYPRIGCCSENRVITIYYLHPGFFNDSSWGQNTGATPYRPYPTLDPKKYKFYSKYAPTAGYTPDFSQGTGEHDPYYKSINWDGGWFSPKILQATRYTYDGEEKAPLPLNAARYNPAEDDGIGNEIWLSSITSHTYQKPRDPVLIFDNTPLWLAFFGFTNYIERLKDKSLFQLSLFVIKSRYIKPGPTAQTQAYFPFVDYNFTIGKNPKESYLTYTDKKLWYPTVFRQLQTINSIVETGPYVPKLQADRDSTWELPYKYIFSFKWGGPLITDQEISDPKNKDEYPVPDTMQKAIQICNPKHQDTSTIFHEWDYRRGYITNPAIKRMSENLIIDSDVSSDAETPSKKRKRVTAELRNPEEKVKKIKKCLLSLCEEHTCQEEEEETDLHQLILKQQQQQQQLKHNILILLKDMKAKQKMLQLQTGVLE

SEQ ID NO: 5009 - protein, 117 aa, Gammatorquevirus sp.; identical to SEQ ID NO: 4849

SEQ ID NO: 5010 - protein, 114 aa, Gammatorquevirus sp.; identical to SEQ ID NO: 4850

SEQ ID NO: 5011 - DNA, 2508 bp, Gammatorquevirus sp.
aaaaaaaaaaaataaaaaaaaaaaaaaaaagtctaggggcaactcgggctagggcagtctagcggaacgggcaagaaacttaaaacaatttttgttttacagatgtcctacttgtttcaaccaacaaaatacaacaatgaaaccaaagaacaactgtggatgagtgtttttgcagatgcccatgattccatttgtgaatgtcctacaccatttgcacacgccctttggtgcatgtttccagaaggtcacaaagatagaaaattaaccattgaacaagtaataaccagagatacagcactatggcattctggtggtacagaagaagaaaaccatggtttggcagatggagacgcaaaccaacaagaaaatacaaaacaacaaccagaagaagaaaaagaagactcccttggagacgtagaaatagaagaacttatcgccgccgccgacgacgccattacaaggtaagaagaaaaaaaagaaaaattactatacaacaatggcaacctgaaagtataaaaaaatgtaaaattaaaggcacaggacagctagtactaggagctgaagggacacaatacagatgctttactgttcataaaaatgaatggacaaatcctaaagttgccactggtgggggatttggagttgaactgtttactctaaattacttatacaaagaatacttagccaaaaataatatatggacagcatcaaatgtttacaaagacttttgcagatacactggatgctccataaccttatttagacaccccactactgactttattttttgctatgacatacagccaccattcacaattaacaagcacacctacatgatggctcatccacactttttacttcaaagaaaaagaaaaaaaatactactaagcactctaacaaaacctaatggaaaattaacaaaaaaaataaaaataaaacctccaaaaatgctacaaaccaaatggcattttcaagaagaatttgcagactttggcttagttactttaatagcatcagcatgcaattttagatatccatggcttgcctgctgcaatgaaaatttattaataacactttactacctacaaccaagtttctggtcacactctgaatgggcacaatattctacaaacccctataaccccaaaggtcacacaaacccaatgaaagacactttaacatataaaggtgaaattaataacaagccctatgagtatactatgacacactttaacccacccacttatcaacaatctctaaacaaagatgtaggttggtttaatccaaaagttcttaatgcacacacagtcttagatggaaagcaaagacaatcattagtaccctgtggagtactcagatataatccatacatagacactggggaaaaaaacaaactctatgtctgtagtgtactagttggatcatggactgaaccaaaagaccaagaccttgtactagaaaactttcctctttgggctatgttttttggattcacatcctacctaaaacaagtaaaatctaaaacagtaccactaaatggatccatgctagtagttaaatctccagctctatacagagtatttggagaagaccccaaagacttctacccactaattgataaatcttttatgctaggcaaaggtacaaacaacacagaccccatactaccaaaagccaacctatggtatccagcagtatttgctcaaagagacagtatttcacaaatagttaattgtggaccttatttaccaaaatacaatgaagtaaaagaaagcacatggcaattaaatttcttttacaacttttattttaagtggggaggctcctacccaccacaacaagaagcagaaaatccaaaggacaaaggtacctatcctatacccaatacagagcaagaaacaatacagattgaaaaccctcttaaacaaaaatacaacaccatatttaaaccctgggactacagaagaggtacccttacaaaaacagctcttaaaagaatgtatgaaaacctctcggatgatgaatctttatcaacagattcaacatgctcaacctctccaaaaagaaagaagctactcccaacactccaagacccgaaaaaagaaagacaagaaatccagacatgtctcctctcgctctgcgaagaaagttccttccaagaaacacaggagaacgccaacctcttccagctcatcaaaaaccagcacaagcaacagcagcaactcaagtacaacttactaacattgatttcagatttgaaagcgaaacagagaaaccttttacatcaatcaggatttctagcttaaacatattcaaacctggctttgaatatgacacagaaaaagaaatggccatagcctttaaaagaccaatgagaaagtttaagcatgatccccccttttacccctggctaccccctgctcccaaagtctgctttaacctcaactacaaagactaggccaacaatgtacacttagacaagcttgtttaataaagttgtaccaaaaa

SEQ ID NO: 5012 - protein, 668 aa, Gammatorquevirus sp.
MAFWWYRRRKPWFGRWRRKPTRKYKTTTRRRKRRLPWRRRNRRTYRRRRRRHYKVRRKKRKITIQQWQPESIKKCKIKGTGQLVLGAEGTQYRCFTVHKNEWTNPKVATGGGFGVELFTLNYLYKEYLAKNNIWTASNVYKDFCRYTGCSITLFRHPTTDFIFCYDIQPPFTINKHTYMMAHPHFLLQRKRKKILLSTLTKPNGKLTKKIKIKPPKMLQTKWHFQEEFADFGLVTLIASACNFRYPWLACCNENLLITLYYLQPSFWSHSEWAQYSTNPYNPKGHTNPMKDTLTYKGEINNKPYEYTMTHFNPPTYQQSLNKDVGWFNPKVLNAHTVLDGKQRQSLVPCGVLRYNPYIDTGEKNKLYVCSVLVGSWTEPKDQDLVLENFPLWAMFFGFTSYLKQVKSKTVPLNGSMLVVKSPALYRVFGEDPKDFYPLIDKSFMLGKGTNNTDPILPKANLWYPAVFAQRDSISQIVNCGPYLPKYNEVKESTWQLNFFYNFYFKWGGSYPPQQEAENPKDKGTYPIPNTEQETIQIENPLKQKYNTIFKPWDYRRGTLTKTALKRMYENLSDDESLSTDSTCSTSPKRKKLLPTLQDPKKERQEIQTCLLSLCEESSFQETQENANLFQLIKNQHKQQQQLKYNLLTLISDLKAKQRNLLHQSGFLA

SEQ ID NO: 5013 - protein, 120 aa, Gammatorquevirus sp.; identical to SEQ ID NO: 3969

SEQ ID NO: 5014 - protein, 137 aa, Gammatorquevirus sp.; identical to SEQ ID NO: 3970

SEQ ID NO: 5015 - DNA, 2507 bp, Gammatorquevirus sp.
aaaataaaaaattgcaaaaattcggcgctggtctaggggcaattcgggctagggcagtctagcggaacgggcaacaaacttaaaacaatatttcttttacagatgtcccgcttctacactggcactaaatacaatggagccacactaaatcaaatgtggatgtctatgatagcagattcacatgatattcactgtgattgtaaaaaaccttttgctcacctacttgacagcatatttccagaaggtcacacagatagaaacaaaacaatagcacatattattcaaagagattatcaagaatgcctttctggtggagaagaagaagaaaaacctggtataccccttggaggcagcgccgctaccgccgccgcagatacaggcgtaaacgtagaagaccatttagcagaagacgcagacgaaatagaaaagctactcgccgccgcagaagaaaactacctaaggtaagaagaaagaaaaaatttttaaaacttgtacaatggcaaccagacagaataagaaaatgtactattaaagggagaggaactctagtaatgggagctcatggcagacaaatgatctgttttaccaatgttaaagacagactaacacctagcagagcacccgcgggaggtggatttggcatagaaagattttccttagggtacttatatgaagaatggaaagctagaaacaatatatggactgcaacaaatgaaaacacagacctagcaagatacctaggctgtgaatttaccttttacagacatcaagatacagactttataattaaatatgaaagacaaggtccttttaatttacaaaaatactcatacatgtatatgcagccacaagaactactactaggaaaacataaaaaaatactactaagtaaacaaacaaatccaaatggaaagttaaaacttagactaaaaatagggccaccaaaactactaacaaataaatggttattacaatcagaactagcaaaacaagacttagtacaaatatcaggagcagcagctagctttagataccccacaataggatgctgcaatgaaaacagaattttaaacctatactcaataaacattgaattttacaaagatgcacactggatgcaagcatactctgccgaggcatactataaaccatacgctacaattccttcagacttaaattttcactataaaacacaagcaggaggagaaggcactgttaaaggaccacaatctaaagacaaagcattgaccttagaatcaggatggtttcaatcaaaaatattaggagcttataaagtaactaaggcacagtcatccacacaatatggcgaactcccaatggtcctacttagatacaatccagcagctgaccaaggaccaggtaacttagtaactatagtagatttagtagcagggcaatggcaaggaccataccctcctgaatatacaatacaagatgtaccactatggctagcactaaatggatatgttaactacataatacaaaaatctggagacaaaggcatcatgaaacataaaattgtttgtattaaaagcccagcactatacagactaccaacagttagtactcaaaaaatatttccaataataggatccaaatttgtaaatgcaaagccaccatatgaccaaccactaacacccgacatgtctagaaattggtaccctacatatgaacaccaacaagaacccttaaatgacattgtttgctgtggacctttagtaccaaaattttataatcaaactaacagtacatgggaattacaatacttttatcgtttttactttaagtggggaggccctgaaattggagacccaacagttgatgatccaaaaaccaaaggagaaaaaaccactgactatacaatgccccgcacaatacaaatatttaacccactcaaaaataaaacagaatccattctacacccctgggacttcagaaggggcattgttacaaaaagagctcttgaaagaatgtgccaaaacctcgaaactgattcaaatttctacccagatggagaaacaccaaagaaaaagaaaaagacaacctgcgagctcagaaacccagaggaagaaatcaaagaagtgcagaactgtgtcctctcactctgccaaacagaaacatcggaggaagaggaccccaacaacctccagcagctcatcctcaagcaaaagctcaagcagcagcagctcaagcacaacatcctagtactactaacagacctgaaaaccaagcaaaactctttgagactacaaacaggaaatttacagtagaagcatttaaacctggctttgaacttcaaacagaaaaagagcttgctattgctttttgcagaccaccaagacattataaaaatgaccccccattttatccatggctaccacctgcaccccttgttaactttaaccttaactacaaatgctaggccaacaatgtacacttagtaaagcatgtttaataaagtttacacccaaaaaaaaaaaaaaaaa

SEQ ID NO: 5016 - protein, 663 aa, Gammatorquevirus sp.
MPFWWRRRRKTWYTPWRQRRYRRRRYRRKRRRPFSRRRRRNRKATRRRRRKLPKVRRKKKFLKLVQWQPDRIRKCTIKGRGTLVMGAHGRQMICFTNVKDRLTPSRAPAGGGFGIERFSLGYLYEEWKARNNIWTATNENTDLARYLGCEFTFYRHQDTDFIIKYERQGPFNLQKYSYMYMQPQELLLGKHKKILLSKQTNPNGKLKLRLKIGPPKLLTNKWLLQSELAKQDLVQISGAAASFRYPTIGCCNENRILNLYSINIEFYKDAHWMQAYSAEAYYKPYATIPSDLNFHYKTQAGGEGTVKGPQSKDKALTLESGWFQSKILGAYKVTKAQSSTQYGELPMVLLRYNPAADQGPGNLVTIVDLVAGQWQGPYPPEYTIQDVPLWLALNGYVNYIIQKSGDKGIMKHKIVCIKSPALYRLPTVSTQKIFPIIGSKFVNAKPPYDQPLTPDMSRNWYPTYEHQQEPLNDIVCCGPLVPKFYNQTNSTWELQYFYRFYFKWGGPEIGDPTVDDPKTKGEKTTDYTMPRTIQIFNPLKNKTESILHPWDFRRGIVTKRALERMCQNLETDSNFYPDGETPKKKKKTTCELRNPEEEIKEVQNCVLSLCQTETSEEEDPNNLQQLILKQKLKQQQLKHNILVLLTDLKTKQNSLRLQTGNLQ

SEQ ID NO: 5017 - protein, 120 aa, Gammatorquevirus sp.; identical to SEQ ID NO: 3562

SEQ ID NO: 5018 - protein, 125 aa, Gammatorquevirus sp.; identical to SEQ ID NO: 3563

SEQ ID NO: 5019 - DNA, 2507 bp, Gammatorquevirus sp.
aaaaaataaaaaaaaaaaaaaaaaaaaaaataaaaagggcaattcgggctagggcagtctagcggaacgggcaagaaacttaaaacaatttcttttacagatgtcatatttgtttcaaccaactcaatacaacaatgaaactaaagaacaactgtggatgagtatttttgcagactcccatgactccatttgtgaatgccctacaccatttgcacacgctctttggtgtatgtttccagaaggccacaaagatagaaatttaaccatttcccagataataacaagagatacagcactatggcattctggtggtacagaagaagaaaaccatggtttggcagatggagacgcaaacctaccaaaaaatacagaacaaccaccagaagaagaaaaagaagactcccttggagacgtagaaatagaagaacttatcgccgccgcagacgacgccattacaaggtaagaagaaaaaaaagaaaaattacaatacagcaatggcagcctgaaagcataaaaaaatgtaaaattaaaggtacaggacagctagtactaggagctgaaggaacacaatacagatgctttactgttcataaaaatgaatggacaaatcctaaggttgcaactggtgggggatttggagttgaactgtttactctaaattacctctacaaagaatacctagctaaaaacaatatatggacagcttcaaatatttacaaagacttttgtagatacactggctgcagcataaccttatttagacatcctcatacagattttattttttgctatgacacacagccaccattcacaattcacaaacacacatacatgatggcacacccacactttttactgcaaagaaaaagaaagaaaattttacttagcactctaacaaaacctaatggtaaactaacaaaaaaaattaaaataaaacctccaaaaatgctacagacaaaatggcatttccaagaagaatttgcagactttggactagttactttaatagcttcagcatgcaactttagacatccatggcttgcctgctgcaatgaaaatttattaataacactgtattacctacaaccaacattttggtcacattcagaatgggcacaatattctacacaaacatacaaccccagaggacacacaaatcccatgaaaactactttaacatataaaggtgaacttaataataaaccttatcaatataccatgcaaccttttaaccctcaaacatatgaccaatcactaaacaaagatgtaggctggtttaatccaaaagtactaaatgcacacacagttttagatggcgaagcaagactatcactagcaccctgtggtgtgctaagatataacccatacatagacacaggtgaaaaaaacaaactatatgtttgtagtgtactagtgggttcatggactgaaccaaaagaccaagaccttatactagaaaattatcctctttgggctatgttttttggatttacatcctacttaaaacaggttaaatctaaaactgtaccactacatggatctatgctagtagtaaaatctccagctctacacagggtctttggagaagatacaaaagacttttacccactaatagacaaatctttcatgcaaggcagaggcacaaacttcacagaccctatactgcctaaaccaaaactttggtatccagcagtatttgcccaaagagacagcatatcacaaatagttaactgtgggccctacctaccaaaatacaatgaagttaaagaaagcacatggcaattaaactttttttacaacttttattttaagtggggtggatcatacccaccacaacaagaagcagaaaatccaaaggacaaaggtacctatcctatacccaatacacagcaagaaacaatacaaattgaaaaccctcttaaacaaaaatacagcacaatatttaaaccctgggactacagaagagggaccattacaaaaacagctcttaaaagaatgtatgaaaacctctcggatgatgaatctttatcaacagattcaacaatctcaacctctccaaaaaagaaaaagctactcccaacactccaagacccgaaaaaagaaagacaagaaatccagacatgtctccgctcactctgcgaagaaagttccttccaagaaacacaggagaacgccaacctcttccagctcatcaaaaaccagcacaagcaacagcagcagctcaagtacaacttactaacattgatttcagatttgaaagtgaaacagagaaaccttttacatcaatcagggtttctagcctaaatatattcaaaccaggctttgaatatgacacagaaaaagaaatgtcaatagcctttaaaagaccaatgagaaaatataagcatgatccccccttttacccatggttaccccctgctcccaaagtctgtttcaacctaaattacaaagactaggccaacaatgtacacttagacaagcttgtttaataaagttgtacccaaaaa

SEQ ID NO: 5020 - protein, 668 aa, Gammatorquevirus sp.
MAFWWYRRRKPWFGRWRRKPTKKYRTTTRRRKRRLPWRRRNRRTYRRRRRRHYKVRRKKRKITIQQWQPESIKKCKIKGTGQLVLGAEGTQYRCFTVHKNEWTNPKVATGGGFGVELFTLNYLYKEYLAKNNIWTASNIYKDFCRYTGCSITLFRHPHTDFIFCYDTQPPFTIHKHTYMMAHPHFLLQRKRKKILLSTLTKPNGKLTKKIKIKPPKMLQTKWHFQEEFADFGLVTLIASACNFRHPWLACCNENLLITLYYLQPTFWSHSEWAQYSTQTYNPRGHTNPMKTTLTYKGELNNKPYQYTMQPFNPQTYDQSLNKDVGWFNPKVLNAHTVLDGEARLSLAPCGVLRYNPYIDTGEKNKLYVCSVLVGSWTEPKDQDLILENYPLWAMFFGFTSYLKQVKSKTVPLHGSMLVVKSPALHRVFGEDTKDFYPLIDKSFMQGRGTNFTDPILPKPKLWYPAVFAQRDSISQIVNCGPYLPKYNEVKESTWQLNFFYNFYFKWGGSYPPQQEAENPKDKGTYPIPNTQQETIQIENPLKQKYSTIFKPWDYRRGTITKTALKRMYENLSDDESLSTDSTISTSPKKKKLLPTLQDPKKERQEIQTCLRSLCEESSFQETQENANLFQLIKNQHKQQQQLKYNLLTLISDLKVKQRNLLHQSGFLA

SEQ ID NO: 5021 - protein, 120 aa, Gammatorquevirus sp.
MSYLFQPTQYNNETKEQLWMSIFADSHDSICECPTPFAHALWCMFPEGHKDRNLTISQIITRDTALWHSGGTEEENHGLADGDANLPKNTEQPPEEEKEDSLGDVEIEELIAAADDAITR

SEQ ID NO: 5022 - protein, 111 aa, Gammatorquevirus sp.; identical to SEQ ID NO: 5004

SEQ ID NO: 5023 - DNA, 2507 bp, Gammatorquevirus sp.
ctaggggcaattcgggctagggcagtctagcggaacgggcaagaaacttaaaactatgctttctttttagatgtcaaagattcaggctaaagacttttacactcccacaccctacaatcaagaaacgaaaaatcaaatttggatgtctcaaattgctgattctcacgataatttctgcaattgtgactatccctttgctcatttgcttgccaatatttttcctgtgggtcacaaagatcgtgatcttacaattaattcaattcttttgagagactacagagaaaaatgcctttctggtggaaaagaagaaaccgtccatggtttggacaatttagaaccaggtggagaagaagaaaatataaaacaagaagaaagagacgacccagatataccagacgcagaagacctacttatggcagccgccgccgccgccgcagacggagagtcaaggtaagaagaaaaaaacctaaaattactatacaacaatggcaaccagactctatagtaaaatgtaaaattaaaggactgtcatgcttatgtgctggggcagagggtagacaatacttttgttatacaaacgaaatagacaatttcttacaaccaaaagctcccggcggtggcggttttggagcagaaatgtttaccctagaatacttatacttacaatggatagcaagaaaaaacatttggactaaatcaaatgactataaagacctagttagatacactggtacagtaattaaaatatttagacaccctacaacagactttgtattccaatatgaaagacaaccaccttttctgctagaaaaagacttttacaatgacatgcacccctacaacatgcttctttcaaaaaaccatagagtcatacctagcttaaaaactaaaccactaggaaaattatatgttaaaataagaattagaccacctaaacaaatgataactaaatggttttttcaaaaagactttgctaaatatggattattcattataaaagcttcagctttaaaccttgggtgggcatactatggcccaaacacccaaagcagattattaacattttattcacttaatactaacttttataaacaaactgattgggctcaatcagcaaaaacagcatggcaaccataccacaactttccaaaagaaaacaagtttttttgggacattaagaaaccagctgaattcatacaagttgaccctaaaacttatgcagagagcatttcaagagacaaaggctggtttcaacctaaagtacttttagcatggaaggttgaaggttcaggaacagttcaacatgaaaaaccaataactatagctagatacaatccagacatagacacaggccaaggaaatgctgtttggatagcctctatagtagctgattcccactgggaacaacctagaaatccagactggcaaatagttggaaaacctctttggatggcattatatggcatgtggaattacttacttaaaactacaaaagacaaaaactttttactacacaacatgtttgtagtaaaaagtccagctataaaacttataaatgcaacagaacaaagagtttttccaatactagatctttcttttataaaaggaaacttaccatatgaagaatacttaacagacagagacaaacaatactggtacccacaagctaaatttcaacaagaagtaataaattcttttgttgaaagtggaccttatgtaccaaaatatagctaccaaaaagaaagcacttgggaactaaaatacaaatatacttgctattttaaatggggaggcccacaagtacatgaccaacttgttcaaaacccacagacccaaggaaaatatgatgttcccgatactgtccagaaaacaatacaagtcagcaacccgctcacacaagactgccaagccatgcttagagagtgggactacagacggggtattgttacaacaacagctcttaaaagaatgtcagaccacctccaatctattgaatctgacctctctgattcagaccaaccagagaaaaagaaaaaaagatatgcagcagaaataccacactaccaagagaaagaaacacaaatcaaaacatgtctcctctcactcttcgaagaagatacctgccaagaaccagaaaacctcaagcagctcatcctacaccagcagcagcagcagcaaaagctcaagctcaacctcctcaaactcatcacagacctgaagagacagcaaacaatgcttcaactccaaacaggcctagaatgaccagattcaaacctgggtttgaatgggacacagaagtacaagtagcaaaagcatttaacagaccccctagactttttaaagaagataccccattttacccctggctccccagacctgtaccccttgttaactttcacttaaattacaaattctaggcccacaactttcacttagtagagtatgtttatataagtctcacccccaaaaaaattgtaaaataaaaaaaaaaaaaaaaataaaaaatt

SEQ ID NO: 5024 - protein, 658 aa, Gammatorquevirus sp.
MPFWWKRRNRPWFGQFRTRWRRRKYKTRRKRRPRYTRRRRPTYGSRRRRRRRRVKVRRKKPKITIQQWQPDSIVKCKIKGLSCLCAGAEGRQYFCYTNEIDNFLQPKAPGGGGFGAEMFTLEYLYLQWIARKNIWTKSNDYKDLVRYTGTVIKIFRHPTTDFVFQYERQPPFLLEKDFYNDMHPYNMLLSKNHRVIPSLKTKPLGKLYVKIRIRPPKQMITKWFFQKDFAKYGLFIIKASALNLGWAYYGPNTQSRLLTFYSLNTNFYKQTDWAQSAKTAWQPYHNFPKENKFFWDIKKPAEFIQVDPKTYAESISRDKGWFQPKVLLAWKVEGSGTVQHEKPITIARYNPDIDTGQGNAVWIASIVADSHWEQPRNPDWQIVGKPLWMALYGMWNYLLKTTKDKNFLLHNMFVVKSPAIKLINATEQRVFPILDLSFIKGNLPYEEYLTDRDKQYWYPQAKFQQEVINSFVESGPYVPKYSYQKESTWELKYKYTCYFKWGGPQVHDQLVQNPQTQGKYDVPDTVQKTIQVSNPLTQDCQAMLREWDYRRGIVTTTALKRMSDHLQSIESDLSDSDQPEKKKKRYAAEIPHYQEKETQIKTCLLSLFEEDTCQEPENLKQLILHQQQQQQKLKLNLLKLITDLKRQQTMLQLQTGLE

SEQ ID NO: 5025 - protein, 127 aa, Gammatorquevirus sp.
MSKIQAKDFYTPTPYNQETKNQIWMSQIADSHDNFCNCDYPFAHLLANIFPVGHKDRDLTINSILLRDYREKCLSGGKEETVHGLDNLEPGGEEENIKQEERDDPDIPDAEDLLMAAAAAAADGESR

SEQ ID NO: 5026 - protein, 108 aa, Gammatorquevirus sp.
MSPLTLRRRYLPRTRKPQAAHPTPAAAAAKAQAQPPQTHHRPEETANNASTPNRPRMTRFKPGFEWDTEVQVAKAFNRPPRLFKEDTPFYPWLPRPVPLVNFHLNYKF

SEQ ID NO: 5027 - DNA, 2505 bp, Gammatorquevirus sp.
taaataaaaaaaaaaaaaaaaaaaaataaaaaataggggcaattcgggctagggcagtctagcggaacgggcaagaaacttaaaatatattctgtttctagatgaacacaccaaaattttttgaaccaccacaatacaacagcacaggaagaaatcaactttggatagatgtctgttgcttggcacacgatacttggtgcggttgtaattatcctgtggctcattttattgattctgttttgcctgttggtcacaaagatagagatcttactatcaatgagatactgtccagggacctaacagcaaaatgccattctggtggcccaggagaaacaagtggtggtcccgcggccgctacaaatacagaagacgcaggccctacagaagaagaactagaaaacattttttcaggagacgccatagaagaactactaaacgccgccgcagaagacgcaggcccaaggtaagaagaaaaaagccttttataaaactactacaatggcagccacagtctattagaaaatgtaaaattaaaggctatgaaaccctcctaatgggagctgatggtaaacaatacagagactatacctcagcaatgaatgaatggataccacctagagtacctggaggtggaggtctagctatctccatatacaccttagaatacttttatgaacaacatttactacacaacaacatatggaccacaagcaatgaaaactatgacttatgcagatacactggatgctcactaatattttacagacacccatacattgactttgtctgtcattacaaaagggaatatcctatgacagaatctgcatacactccaatgactacacatccattgcttctactacaacaaagaaaaaaaattttaataccatccagagtcacacagccccatggcaaaaactatgttagaaaaaaaattaaagtaccaagacaacaagtaaacaaatggttttttataagagactatgcaaagacaccactactactactacaaacagctgcctgtgacctaaactttgttagaatgggtagacaaagtgaaaacacactcacaaacatatattctctaaatattggcttctattctaatggagcatttggtcaaccaaacatagccacagggcacacatacatgcctatacatacacaaacataccaaacaaacatgatttcaggcacagacctacaaggaaaatcttttaacacaaacatgcaaaatacttacctttcctcagtaggatacagcacaggttggtttacctcaaaagttttaactgcaaaaaaaataacaacaccacaaatggatgcaaaaccaatttatttactaagatacaaccctaacatagacactggaaaaggaaacaaagtatggctaaaatctatctttgcagaccactggggtccacctgcaacagacttatttttaatatttgaagatgaacccctatggctatcattctatggctggtttgactacataaactctttaaaacctgcctatgacattttcaacaaatataccttagtaatacaatcagacttctttcaatccccaatacaaaaacaatatatagtacctatagatgaaagctttctagtaggtaatggagcatatgatgctacagtaacagacttagacaaaactaaaccttggctacctacactaagacaccaacaaaaatctattaacaatatagtaaaatgtgggccatttataccaagaccagagggcaaactaggcaactgggaactgcatctaaaatacagttttttttttaagtggggaggagcacagccaccagaaacaaacatctatgaccctaccaaaggaagcaaataccccgttcccgataacttctacaaaacagtacaaatcacagatccaacaaaacaaataccacaaacaatcttacacacctgggattacagacgaggcctccttacacaaaaagctcttaaaagaatgtatgacaacttatcagataaatcaactatatcaacagattcagagtgcctcgaacccccccacaaagtccaaagatctgcaaaacaaccacaaatccaagaaaaagaaacagaagtcctcaagtgtctccagcaactctacaaagaaaattcctaccaagaaacagaggaaaagcaagaagaagacttacaccagctcatccagcagcagcagcaccaacagcagctcatcaagcacaacctcctgaaattaattacccaaatgaagaaaacacaactacaaatgcaaatacaaacaggaatactaccttaaacagaagattcagaccaggctttgaagaagaaacagaaaaacagctagcagcaattttcagaaggccacctagaacctttgtcaatgacccccctttctacccttacctaccccctgctcccaaagtatgctttaagttaaacttcaaaggctaggccaacaatgtacacttagtggtggatgtttatataagcagcacacttttcaaa

SEQ ID NO: 5028 - protein, 662 aa, Gammatorquevirus sp.
MPFWWPRRNKWWSRGRYKYRRRRPYRRRTRKHFFRRRHRRTTKRRRRRRRPKVRRKKPFIKLLQWQPQSIRKCKIKGYETLLMGADGKQYRDYTSAMNEWIPPRVPGGGGLAISIYTLEYFYEQHLLHNNIWTTSNENYDLCRYTGCSLIFYRHPYIDFVCHYKREYPMTESAYTPMTTHPLLLLQQRKKILIPSRVTQPHGKNYVRKKIKVPRQQVNKWFFIRDYAKTPLLLLQTAACDLNFVRMGRQSENTLTNIYSLNIGFYSNGAFGQPNIATGHTYMPIHTQTYQTNMISGTDLQGKSFNTNMQNTYLSSVGYSTGWFTSKVLTAKKITTPQMDAKPIYLLRYNPNIDTGKGNKVWLKSIFADHWGPPATDLFLIFEDEPLWLSFYGWFDYINSLKPAYDIFNKYTLVIQSDFFQSPIQKQYIVPIDESFLVGNGAYDATVTDLDKTKPWLPTLRHQQKSINNIVKCGPFIPRPEGKLGNWELHLKYSFFFKWGGAQPPETNIYDPTKGSKYPVPDNFYKTVQITDPTKQIPQTILHTWDYRRGLLTQKALKRMYDNLSDKSTISTDSECLEPPHKVQRSAKQPQIQEKETEVLKCLQQLYKENSYQETEEKQEEDLHQLIQQQQHQQQLIKHNLLKLITQMKKTQLQMQIQTGILP

SEQ ID NO: 5029 - protein, 121 aa, Gammatorquevirus sp.
MNTPKFFEPPQYNSTGRNQLWIDVCCLAHDTWCGCNYPVAHFIDSVLPVGHKDRDLTINEILSRDLTAKCHSGGPGETSGGPAAATNTEDAGPTEEELENIFSGDAIEELLNAAAEDAGPR

SEQ ID NO: 5030 - DNA, 2504 bp, Gammatorquevirus sp.
ctaggggcaattcgggctagggcagtctagcggaacgggcaagaaacttaatatataactctttttacagatgcaaagacttactttttttcaaccaccactatacaatcatattggcagaaatcaactttggatagatgcctgtatctttgcacacgattgctggtgtggctgcaatcatcctattgctcattttattgattctgtattgccttctggtcacaaggatagagaccttactattaacgagatcctgtccagggacctaaaagaaacatgcccttctggtggaaccgtcgcaaaaagtggtggggacgcggccgctttcgctaccgaagaagaaaatcaaatttcaaacgcagaactagaagaaatctttacagaagacgccataaacgagctcctagacgccgccgcaaaagacgaacaaccaaggtaagaagaaaaaagaaataccttaaattactacaatggcagccagaatctattagaaaatgtaaaattaaaggctatgaaacccttatactaggagctaatggaaaacaatttagagactatacatctaccatgaatgactgggttccacccacagtaccaggtggaggtggattttcaatatcaagatatactttagaatacctgtatgaacaatttcaactacacaacaacatatggacacattccaatgaaaactatgatctctgtagatacctaggaactaaaattgtattctacagacatccacacacagactttgtagtacaataccaaagagaatatcccatgacagaaacagccctaacaccactacatacacatccactaattttactacaacaaaaaaacaaaataataattccaagcagaataacaaaaccacatggcaagattaaaattaaaaaatttattaaaccacctgcacaacaaacaaataaatggtttttcattagagactttgcaaaaaccccactactattaattaaagcaacagcctgtgatttaaactatgttagactagccaaaggcagtgaaaacaaccaaacaaacatatggagtctcaacactgtattttacttaaatggagcctttggacaaaaagcaagcagtcataatacctatgaacctgcacacacaatgacttttcaacaaggacaaatacaaggtaccctacccaacaacaaatcatttcaaacacacatgaaaaacacatatgattcttcagtaaattattctgaaggctggtttaactctaatgtattactcagctctacacttacagtacctcaattacaaactaagcctgttttcatcacaagatacaatccaatgctagacacaggcaaaggtaataaaatatggctaaaatcaatatttgcagaatcctgggctccaccatccattgaaacatatttaatcatgcaagatgaacctctatggctacttttttatggctggctagattatatcaacgaattaaagccagcatatgacatattcaacaaatacaccatagtcatacaaagcccttactttcaaactcctacacccaaaccaacttacttagtaccactagatgactcatttatacaaggaaacggaccatacaacagcactcctacaactacagataaaaacagatggatacctgtactaaaacaccaacaacaatctataaacaacttagttaaatgtggcccgttcatcactaaaccagatggaaaatattcaaactgggaattacatctaaactacacttttctttttaagtggggaggagcacaacctccagaaaacaccatatatgatcccaccaaaggaagtatctaccctgtgcccgataaattctacaaaacagtacaaatccaagatccaacaaaacaaatcccacaaaacatactccacacatgggacttcagaagagggattgttacaacaaaagctcttaagagaatgtatgactacttatcagatgaatcaaatatatcaacagattcagagtgcccagaaccccagaaaaaagccaaaaaatcagccagacaagtcctcggccaagaaaacaaaaaagaaagcctcaactatctccagcaactcttcgaagaagatacatcacaaaaagaagaaacccaaaagaaaacaatcgagcagctcatcgagcagcagcagcagcagcagcagaatatcaagcacaacctcatcaagctaatcacagatgtgaagaaaacacaactgcagatgcaagtacacactggaattttaaactaaacagaaagtttaaaccaggttttgaagaagaaacagaaaaacaactagcagcagcatttaaaagacccccaagaacctatgtaaatgacacaccattttacccatggttacccccagcccccaaagtctgctttaagcttaacttcaaaaactaggccaacactgttcacttagtggtgtatgtttaataaagtttacaccccaaaaaaatatgtaaaaaaaaaaaaaaaaaaaaataaaaa

SEQ ID NO: 5031 - protein, 661 aa, Gammatorquevirus sp.; identical to SEQ ID NO: 4514

SEQ ID NO: 5032 - protein, 122 aa, Gammatorquevirus sp.; identical to SEQ ID NO: 4515

SEQ ID NO: 5033 - DNA, 2503 bp, Gammatorquevirus sp.
cacactcacacccacacccaaaccaccgaggtctaggggcaattcgggctagggcagtctagcggaacgggcaacaaacttaaaacaatatttcttttacagatgtcccgcttctacactggcactaaatacaatggagccacactaaatcaaatgtggatgtctatgatagcagattcacatgatattcactgtgattgtaaaaaaccttttgctcacctacttgacagcatatttccagaaggtcacacagatagaaacaaaacaatagcacatattattcaaagagattatcaagaatgcctttctggtggagaagaagaagaaaaacctggtataccccttggaggcagcgccgctaccgccgccgcagatacaggcgtaaacgtagaagaccatttagcagaagacgcagacgaaatagaaaagctactcgccgccgcagaagaaaactacctaaggtaagaagaaagaaaaaatttttaaaacttgtacaatggcaaccagacagaataagaaaatgtactattaaagggagaggaactctagtaatgggagctcatggcagacaaatgatctgttttaccaatgttaaagacagactaacacctagcagagcacccgcgggaggtggatttggcatagaaagattttccttagggtacttatatgaagaatggaaagctagaaacaatatatggactgcaacaaatgaaaacacagacctagcaagatacctaggctgtgaatttaccttttacagacatcaagatacagactttataattaaatatgaaagacaaggtccttttaatttacaaaaatactcatacatgtatatgcagccacaagaactactactaggaaaacataaaaaaatactactaagtaaacaaacaaatccaaatggaaagttaaaacttagactaaaaatagggccaccaaaactactaacaaataaatggttattacaatcagaactagcaaaacaagacttagtacaaatatcaggagcagcagctagctttagataccccacaataggatgctgcaatgaaaacagaattttaaacctatactcaataaacattgaattttacaaagatgcacactggatgcaagcatactctgccgaggcatactataaaccatacgctacaattccttcagacttaaattttcactataaaacacaagcaggaggagaaggcactgttaaaggaccacaatctaaagacaaagcattgaccttagaatcaggatggtttcaatcaaaaatattaggagcttataaagtaactaaggcagagtcatccacacaatatggcgaactcccaatggtcctacttagatacaatccagcagctgaccaaggaccaggtaacttagtaactatagtagatttagtagcagggcaatggcaaggaccataccctcctgaatatacaatacaagatgtaccactatggctagcactaaatggatatgttaactacataatacaaaaatctggagacaaaggcatcatgaaacataaaattgtttgtattaaaagcccagcactatacagactaccaacagttagtactcaaaaaatatttccaataataggatccaaatttgtaaatgcaaagccaccatatgaccaaccactaacacccgacatgtctagaaattggtaccctacatatgaacaccaacaagaacccttaaatgacattgtttgctgtggacctttagtaccaaaattttataatcaaactaacagtacatgggaattacaatacttttatcgtttttactttaagtggggaggccctgaaattggagacccaacagttgatgatccaaaaaccaaaggagaaaaaaccactgactatacaatgccccgcacaatacaaatatttaacccactcaaaaataaaacagaatccattctacacccctgggacttcagaaggggcattgttacaaaaagagctcttgaaagaatgtgccaaaacctcgaaactgattcaaatttctacccagatggagaaacaccaaagaaaaagaaaaagacaacctgcgagctcagaaacccagaggaagaaatcaaagaagtgcagaactgtgtcctctcactctgccaaacagaaacatcggaggaagaggaccccaacaacctccagcagctcatcctcaagcaaaagctcaagcagcagcagctcaagcacaacatcctagtactactaacagacctgaaaaccaagcaaaactctttgagactacaaacaggaaatttacagtagaagcatttaaacctggctttgaacttcaaacagaaaaagagcttgctattgctttttgcagaccaccaagacattataaaaatgaccccccattttatccatggctaccacctgcaccccttgttaactttaaccttaactacaaatgctaggccaacaatgtacacttagtaaagcatgtttaataaagtttacacccacacaatcacaac

SEQ ID NO: 5034 - protein, 663 aa, Gammatorquevirus sp.
MPFWWRRRRKTWYTPWRQRRYRRRRYRRKRRRPFSRRRRRNRKATRRRRRKLPKVRRKKKFLKLVQWQPDRIRKCTIKGRGTLVMGAHGRQMICFTNVKDRLTPSRAPAGGGFGIERFSLGYLYEEWKARNNIWTATNENTDLARYLGCEFTFYRHQDTDFIIKYERQGPFNLQKYSYMYMQPQELLLGKHKKILLSKQTNPNGKLKLRLKIGPPKLLTNKWLLQSELAKQDLVQISGAAASFRYPTIGCCNENRILNLYSINIEFYKDAHWMQAYSAEAYYKPYATIPSDLNFHYKTQAGGEGTVKGPQSKDKALTLESGWFQSKILGAYKVTKAESSTQYGELPMVLLRYNPAADQGPGNLVTIVDLVAGQWQGPYPPEYTIQDVPLWLALNGYVNYIIQKSGDKGIMKHKIVCIKSPALYRLPTVSTQKIFPIIGSKFVNAKPPYDQPLTPDMSRNWYPTYEHQQEPLNDIVCCGPLVPKFYNQTNSTWELQYFYRFYFKWGGPEIGDPTVDDPKTKGEKTTDYTMPRTIQIFNPLKNKTESILHPWDFRRGIVTKRALERMCQNLETDSNFYPDGETPKKKKKTTCELRNPEEEIKEVQNCVLSLCQTETSEEEDPNNLQQLILKQKLKQQQLKHNILVLLTDLKTKQNSLRLQTGNLQ

SEQ ID NO: 5035 - protein, 120 aa, Gammatorquevirus sp.; identical to SEQ ID NO: 3562

SEQ ID NO: 5036 - protein, 125 aa, Gammatorquevirus sp.; identical to SEQ ID NO: 3563

SEQ ID NO: 5037 - DNA, 2503 bp, Alphatorquevirus sp.
ctcccggcaccccccaacccctccggtagcagagcggcatggcctactggtggtacagacggagacgaagagccccgaggtggaggagacggcgctggagggttcgcagacctcgcagacgaagaactgctgtccgccgccgtagaggccgccgaagagtaagaaagaggagggggaggtggaggaggagttatagaaaatggcggaggggcagaaagagacgcaaacacaagagacgcttagtactgactcagtggcaacctgcttttataagacgctgctatatagtaggcttcttgcccctcataatctgcggagaaaacacctccgcaagaaactttgctacccactctgacgacctcatttccaacggaccgtacgggggaggcatgacgaccactaaattcaccctcagaatactgtatgacgaacacctcaggtggctaaactactggactgttagcaaccaggacctagacctgtgtagatacctggggggcaccttctatgcatacagacaccccacagtagactttattgtacagatacatactagtccccctttcctagacactcccctcacagggcccagcatacaccctggcatgctcatgctaacaaaaaacaaaatactaatacctagcctgaaaaccagaccaaacaaaaaacacaaagtaaaaattagattcaggcccccaaaactctttgaagacaagtggtacccccagtcagaactctgtgacaccacactactaaccgtctttgcaaccgcatgtgacctgcaatttccgttcggctcaccactaactgacaaccattgcgtcaacttccaggtgctaggttccgtttacaaacggcacctcagtatacttcctgataaactaaagttagctaaaaatcactttgataagaacttatattcagttgctgcttactacaacacattccaaacaatagctcaaataaaaccttccgcccaacaaacaggtttcagccctcattggtcctcaatagttaacaacacacaattaacaccagatggcacaaaccagtctaactcaaatgacacctggtacctaggcaatgcatatgatgtccaaaatgcaaaagcagcagcagaaaaaataagacaaaaatacttaaccgctactagacaagcactacccgccctattaacactaggagacgaattactagaataccacacaggtatctacagctcaatattcttatcggcaggcagatcttactttgaaacactaggtgcctacacagacataatctacaatccctttgtagacaaaggaataggaaacaaagtatggttagaccccctaatcaaagaagatgcagtactagacacaaaaaaagccaaactactaatagaagaccaaccaatatgggcagcactatttggatacacagaatttgcagcaaaatacacaggagactctgcaataacagccaactacagacttgtaataagatgcccctacacagaccctatgctagtagacagagacaatgaactacaggggtttgtaccatactctaaaaactttggcaacggaaaaatgccagggggctctgccaacgttccactaactatgagaataaagtggtaccccatgctatttcaccaactagaggtactagaagaactagtgcagtccggaccgtttgcatacaagggcgaccaaaagagctgtgtacttgctttaaaatacatcttcagatggaaatggggaggtaaccctgtgtctcaccagattgtacgcaacccctgcaaaggaggcacccgttcccgtcgagagcctcgctcagtacaagcagctgacccgaaatatgtcacaccgaggctgtccttccactcgtgggacttcaaacgagggctttttggcgcggcaagtattaaaagaatgtcagaggaatcaggagctcctgtctatcctacaggcccaccgagaaaaagaccaaaaagagacaccgacccgtacgactcgcagcaagaagaaaactcgagttcaagacacctccagctccagccctgggtccactccagccaagaagtccaaagcgaagaagagacgcaagtcccgcaaaacctacaagaacaactcctccagcagctccgagagcagcagcagctcaggctccacttacagtccctcgccaaccaagtcctcaaaatcaaagcgggatacagcatacaccccctattatcttcccaagcctaaacaaagtctatatgtttgagcctaaaggccccaaacccatacaaggctatgaggcctggttagatgaataccaaacagcaggtatttgggataggccagtgagaacataccacacagacacccccttctacccctgggcacctaaaccccccaaccaattccgcgtcagctttaaactcggctttcaataaaatttcaaggcctttcactgctcacttgtcggtgtctacctctataagtcactaagcactccgagcgtcagcgag

SEQ ID NO: 5038 - protein, 732 aa, Alphatorquevirus sp.
MAYWWYRRRRRAPRWRRRRWRVRRPRRRRTAVRRRRGRRRVRKRRGRWRRSYRKWRRGRKRRKHKRRLVLTQWQPAFIRRCYIVGFLPLIICGENTSARNFATHSDDLISNGPYGGGMTTTKFTLRILYDEHLRWLNYWTVSNQDLDLCRYLGGTFYAYRHPTVDFIVQIHTSPPFLDTPLTGPSIHPGMLMLTKNKILIPSLKTRPNKKHKVKIRFRPPKLFEDKWYPQSELCDTTLLTVFATACDLQFPFGSPLTDNHCVNFQVLGSVYKRHLSILPDKLKLAKNHFDKNLYSVAAYYNTFQTIAQIKPSAQQTGFSPHWSSIVNNTQLTPDGTNQSNSNDTWYLGNAYDVQNAKAAAEKIRQKYLTATRQALPALLTLGDELLEYHTGIYSSIFLSAGRSYFETLGAYTDIIYNPFVDKGIGNKVWLDPLIKEDAVLDTKKAKLLIEDQPIWAALFGYTEFAAKYTGDSAITANYRLVIRCPYTDPMLVDRDNELQGFVPYSKNFGNGKMPGGSANVPLTMRIKWYPMLFHQLEVLEELVQSGPFAYKGDQKSCVLALKYIFRWKWGGNPVSHQIVRNPCKGGTRSRREPRSVQAADPKYVTPRLSFHSWDFKRGLFGAASIKRMSEESGAPVYPTGPPRKRPKRDTDPYDSQQEENSSSRHLQLQPWVHSSQEVQSEEETQVPQNLQEQLLQQLREQQQLRLHLQSLANQVLKIKAGYSIHPLLSSQA

SEQ ID NO: 5039 - DNA, 2503 bp, Gammatorquevirus sp.
gtttatataagtttgcaccccaaaaaaattgtaaaatagcaattcgggctagggcagtctagcggaacgggcaagaaacttaaaactatgcttcttttacagatgcaaaacctatgccacaaagactactacaaaccatcaccatttaacaatgacaccaaaaaccagatatggatgtcaatgattgccgactcccatgacattcactgcaactgctggcatccttttgctcacctgcttgcttctatttttcctcctggtcataaggaccgtggtcttacagtgcaagaaatccttaccagagactacaaagaaatatgccgttctggtggagaagaagaaagaaaccttggtttaccaacaggtacagagcctaccgccgccgccgctggcctaaaagaagaagaagaagaatatataaaagacgaagagctacaagatttaataggcgtaggagaaagcgccgcagatacaaggtaagaagaaaaagacaaaatataattgttagacaatggcaaccagactctataaggagatgtaaaattaaaggaatgggaatattagtacttggagcacaaggatcacaaatagataactttacagtttctaaatgtgacaatgttcctccaaaactaccctgggggggatcttctggactagaaaatataactttaacatatctatatgaagagcaccgctttaaaaacaatatatggacaacttcaaatgtcatgagaaacctatgtagatacttaagagtaagacttactttttttagacatgtagatacagactttataattgtatacaatagacaaccaccttacatattaaacaaatactcatttccaggctgccatccacatcaactactactagacaaacacaaaataatactacttagtcaagccagtaaacctaatggtaaatatgaaaaaaaagtttcaattagaccacctaaacaaatgattaataaatggttttttactaaagattttacaaaccacactctactaattttaaaagcctctgccatgaactttagatacagctacctaagtagaactaatgaaaacatgctctgtacaatttattccttaaacaccaagttttaccaaaacccagactgggatcaagcaagaggtactgactactatagaccttataaaacagcaccaaaccctttttggttttttgatgaaaaaggcaataaagttagtctaagctttagtaaaggccagcatccatcctctgacctgtactatcaaagcattaactatacaacaggctggttttcaagtaaatttttaaaggccagcaaattacaaggagaagaacactcaactactacaccagcaatacatcaagttactgtttctagatacaacccaaacagagatgatggtaaaggcaacaaagtgtggtgtgttagtacacaacaaagttcctggttaaactcatcaggagctgatctagttattgaagaactaccactatggctagcactgtatggttactacagttgggtttcacatgaaaaaccagctgactgggaactacaccatgttatttgcataaaaagttcagcaatttactgtgcacctgaaataggctcttgtgatatatattgccctatagactatgaatatattcagggaaaaagaccatatgaccaaacaatatctgaacaaggcaaaaaactatggttcccaaatatgtactggcaaaaaaaaaccttaaactgtataatacaaagtggaccctttataccacaatactcagaagaaaccagcagtacttgggaactaaaatataactactgtttttattttaagtggggcggagcacttaactcagaccaagaagttaaagatccaaaagaccttgacacctatgatgtacccgatacaatcacacaaacaattaaaattgttaacccagcaaaacaaacagcagaaaatgcactttggccatgggactacaggaggggatacattaaagaaagagctattaaaagaatgtcacaagacatcccaactgattcagaatttcaatatattacagaagaaactccaacaaagagacaaagattgggagcaacacccagatatccccaggaagaagacaaagaaatccaagcatgtctccaaactctctgcgaaaaaaatacatgccaagagtcgcaagacccgacactccagcagctcatcaaccaccagcaccagcagcaagagcaactcaagtacagcatcgtcaagctcctcatgaacctgaaagaaaaacaaagagccctacaataccacacagggttgttaaactaacaccattcaaacaaggatttgaaatggacactgaaaaagagttagcacaagcatttaaaagaccccctagactgtttaaagaagactctcctttttacccctggctacccaaaccaacacccattgtaaactttcaccttaactacaaattctaggcctacactattcacttagtggtgtat

SEQ ID NO: 5040 - protein, 667 aa, Gammatorquevirus sp.
MPFWWRRRKKPWFTNRYRAYRRRRWPKRRRRRIYKRRRATRFNRRRRKRRRYKVRRKRQNIIVRQWQPDSIRRCKIKGMGILVLGAQGSQIDNFTVSKCDNVPPKLPWGGSSGLENITLTYLYEEHRFKNNIWTTSNVMRNLCRYLRVRLTFFRHVDTDFIIVYNRQPPYILNKYSFPGCHPHQLLLDKHKIILLSQASKPNGKYEKKVSIRPPKQMINKWFFTKDFTNHTLLILKASAMNFRYSYLSRTNENMLCTIYSLNTKFYQNPDWDQARGTDYYRPYKTAPNPFWFFDEKGNKVSLSFSKGQHPSSDLYYQSINYTTGWFSSKFLKASKLQGEEHSTTTPAIHQVTVSRYNPNRDDGKGNKVWCVSTQQSSWLNSSGADLVIEELPLWLALYGYYSWVSHEKPADWELHHVICIKSSAIYCAPEIGSCDIYCPIDYEYIQGKRPYDQTISEQGKKLWFPNMYWQKKTLNCIIQSGPFIPQYSEETSSTWELKYNYCFYFKWGGALNSDQEVKDPKDLDTYDVPDTITQTIKIVNPAKQTAENALWPWDYRRGYIKERAIKRMSQDIPTDSEFQYITEETPTKRQRLGATPRYPQEEDKEIQACLQTLCEKNTCQESQDPTLQQLINHQHQQQEQLKYSIVKLLMNLKEKQRALQYHTGLLN

SEQ ID NO: 5041 - protein, 130 aa, Gammatorquevirus sp.
MLLLQMQNLCHKDYYKPSPFNNDTKNQIWMSMIADSHDIHCNCWHPFAHLLASIFPPGHKDRGLTVQEILTRDYKEICRSGGEEERNLGLPTGTEPTAAAAGLKEEEEEYIKDEELQDLIGVGESAADTR

SEQ ID NO: 5042 - protein, 111 aa, Gammatorquevirus sp.
MSPNSLRKKYMPRVARPDTPAAHQPPAPAARATQVQHRQAPHEPERKTKSPTIPHRVVKLTPFKQGFEMDTEKELAQAFKRPPRLFKEDSPFYPWLPKPTPIVNFHLNYKF

SEQ ID NO: 5043 - DNA, 2501 bp, Gammatorquevirus sp.
cacttagtagagtctgtttatataagcgaggtctaggggcaattcgggctagggcagtctagcggaacgggcaagaaactaaaatttatttttactttacagatgcaaaacctgtctcacaaggacttttttaaaccaacaccttacaatacagataccaaaaatcaaatatggatgtcacaaatttctgattctcatgacaatatctgtcactgcaacagtccttttgggcacctgcttgcttctatttttcctcctggtcataaagaccgtgatcttacaattaatcaaatactacaaagagactaccaagcactatgcctttctggtggagacgcagaagaaagccatggtttcgcagattcaaatataaaaccagaaaaaggtttagaagaagaagaagaagattccctagacggagaagatatagaaaacttactcgccgccgccgcaaaagaaaggtaagaagaaagcttcaaaaaataactcttaaacaatggcaacctgaatgtataaaaaaatgtaaaataataggattttcatgcttagtactaggagctaatggaagacaaatgtactgttatacaaatgtagctgatcaatatacaatagcaagagcacctggaggagggggctttggctgtgaacttataaacttaaaatggttatatgaccaatatactgcacataacaatgtgtggactaaatctaatgagtacacagacttagtaagatatacaggctgtactataactgttttcagacatgcatatgtagactttatttttcaatattcactgcaaggtccatttacattaaacaaatatacatacccacaacttcaaccacaaaatgctcttctagccaaacataaaagaattattttaagcagacaaaatgctccaaataaaaagcaagctgtaaaaattaaaattaaaccacctaaactaatgtcaaccaagtggttttttcaaaaagatttctgtgattatgctctagtacaaatatgtgccagtgcatgctcactatcatttcctagaatacaaccaaatgcacaaaaccaaatcataactctatatgccttaaatccttctttctactttaacagtaactggctagccacaagtatagaaggctatagaaatataagtacacaaagttttccactttattttgatcacaacataaaaggcattcctacaccatatgaactaaaccccaacaacattcctgctactgtagaactaccatatagaacagataagtatctctacacaacttcatacaaatatggattcttttcaccacaagtaatgacagcaactaaagtatatacagacaaggaccacccagacaaaactaaaattgctaacttaccacttatagttcttagatacaacccaaacacagatgatggctatggcaatgaaatttacttaacaagcatacacaaaggacactatgacaaaccctcagttacaccagattatatgtttccaggtgtccctctctggatgggactatatggctacggaaactatcttatacaatccagcaaagacaaaggcctactaactacacacatgttcatattaaaatcaaggtcactacacccactatcacaagctaccaaagatgtatactacccaataattaatacagatatggcttttggaaaactcccatatgatgaatatataactactgccaaaaaaaatgcatggtatcctacaggagaaatgcaagatgatgctttaaataacatagtaatgacagggccattccaaccaaaattcaacaatatgactaacagcacctgggaacttgactacaaatacaaattttttttcaagtggggcggtccatacacagcagaccccgtcgcagaagacccatgtaaaaaaggaaccttccctacactcagtgcactgcaacaaacaatacaggttaagaacccagaaaaacttagtccagaatccattctacaccagtgggacttcagaagggggattgttacagcaacagctcttaaaagaatgtcagaaaacctcgaaactgatacatctttcgaatctgatgactcagaaacaccgaaaaagaaaagaaaagtcaccaaagagatgccatgcttcaatcaaaaggaagagaaaatcaaaaaatgtctcctctcactctgcgaagagcctacctaccaagaaaccccggaaaacctacaccagctcatccagcagcagcagcagcagcagcaccagctcaagagaaacatctacaagctcctcaaacacctgaaacatggacaacaacaagtacaactccaaacaggagttttagagtagagccattcaaacctggatttgaatgggaaacagagtgtgaatgtgcaaaagcattttgcagaccacccagacattataaaaatgatcccccattttacccctggcttcctcctgcacccaaagtaattttttaaactcaattttaaagactaggccaacaatgta

SEQ ID NO: 5044 - protein, 672 aa, Gammatorquevirus sp.; identical to SEQ ID NO: 4665

SEQ ID NO: 5045 - protein, 120 aa, Gammatorquevirus sp.; identical to SEQ ID NO: 4666

SEQ ID NO: 5046 - protein, 114 aa, Gammatorquevirus sp.
MLQSKGRENQKMSPLTLRRAYLPRNPGKPTPAHPAAAAAAAPAQEKHLQAPQTPETWTTTSTTPNRSFRVEPFKPGFEWETECECAKAFCRPPRHYKNDPPFYPWLPPAPKVIF

SEQ ID NO: 5047 - DNA, 2501 bp, Gammatorquevirus sp.
aatggagggtcttctttaaacattcttggggtctaggggcaactcgggctagggcagtctagcggaatgggcaagaaacttaaaactattttacttttttagatgtcaagattctaccaaagaacaccttacaatggagatactaaaaaccaaatgtggatgtcaatgatttcagatggccatgatatattctgtggatgtactcaaccttttgctcaccttctagattctattttccctgaaggtcactctgacagagacaagcctatatcctttataattaaaagagatatacaacaatgcctttctggtggaagcgaagaaacaaaccatggtttaccacttggcgcaagcgctggaaatctcgaagatataaaacaagaagaagaagatttaggagacgcagacgacctccttatggccgccgtcgccgccgcagaagaaaaccaacaaaggtaagaagaaaaaaaaaacaaataattgtaaagcaatggcaaccagactctatagttaaatgtaaaataaaaggcttaggatgcctagtagctggagcagaaggcagacaattttattgctatactaatgaaatagactcatatccacaaccaaaagcaccaggtggaggtggatttggagctgaagtttatacattaggttacttatacaaacaatggattgccagaaaatgcatatggacaaaatcaaatgactataaagacttgtgcagatacacaggtacaaaaataagattttttagacatccaaccacagactttgtagccagctatataagacagccaccatttgaacttaccaaagagacatatccagacctgcacccagtatcaatgttactaagccgacaccatgtggttatacctagcaaaaaaactaaaccaggaggcagaaatacagtaaccttaaaaattaaaccaccaaaacaaatgctatctaaatggtacttccaagaaccattttcatcagtaggacttttccaactacaggccacatcagcaaatctaggctttgcatactatggcccaaattaccaaagcagactacttactttttattcacttaacacaaatttttatacacaagttaattgggctcaaactagaagcacaacttctcacccacaaatatatactccatatccacaataccctactactaaatggcctgtttttacataccccacatcaactggaggaacagctactgtcacaccacaaccaactacttactatgaatccattaactatgataaagggttttttcaaacaaaagttttaatagcaacaaaaattgaacacaaccaagtagcacaacatgaaactcctgtaacaatagcaagatacaacccagacctagacgatggatcagacactgctgtatggctaacatcaattataagtgactctcactggtcacaaccaaaagacaaagatttaatcattgtgggtagaccactatggatggccttatatggcatgtggaactatgtaattaaacacaagcaagacaaaaactttcttagatcttacatgtttgtagtacaatcatcagcaataaaacttgttaacaacacatcacaaaaagtattccctatactagactacagttttataacaggaaaaatgccctatggtgaattactaacagaaaatgacaaaaaattttggtatccatcttcctataaacaacaagaaacaattaataacataatagaagtaggcccatacatacccaaatattctaacttaaaagagagcacctgggaactaaaatacatgtatacttgttattttaagtggggaggacccgaaattgcagatcaacccgttcaaaatccagaaaaacaaagaacctatgatgttcccgatactctctacaaaacaatacaagtctctgacccgctcaaacaaagctgcaaagcaatgcttagagcctgggactacagaaggggcatcattacaagctcagctattaaaagaatgcaaagccacctcccaattgattcatctgtcgaatctgattcaggagaaacaccaccaaaaaagaaaaagagaacagcagaaatccccacagcccaagaagaaacacaggagatccagagttgtctccgctcactcttcgaagaagatacatgccaagacccacaaaacctccagcacctcatcgagttccagcagcagcagcagcagaaactcaagcacaacattatcaagctcctcatagacctgaagaaaaaacagagaatactacaactgcaaacaggtgtagaatgactccctttaaaaaaggctttgaaatggacacagaaaaagaattagcacatgcatttagtagacccccaagaatgtttaaagaagaccctccattctatccctggctacctaaacttactcccattgtaaactttcaccttaattacaaattctaggcctacaattttcacttagtggtgtatgtttatataagttgtaccccagggatag

SEQ ID NO: 5048 - protein, 663 aa, Gammatorquevirus sp.
MPFWWKRRNKPWFTTWRKRWKSRRYKTRRRRFRRRRRPPYGRRRRRRRKPTKVRRKKKQIIVKQWQPDSIVKCKIKGLGCLVAGAEGRQFYCYTNEIDSYPQPKAPGGGGFGAEVYTLGYLYKQWIARKCIWTKSNDYKDLCRYTGTKIRFFRHPTTDFVASYIRQPPFELTKETYPDLHPVSMLLSRHHVVIPSKKTKPGGRNTVTLKIKPPKQMLSKWYFQEPFSSVGLFQLQATSANLGFAYYGPNYQSRLLTFYSLNTNFYTQVNWAQTRSTTSHPQIYTPYPQYPTTKWPVFTYPTSTGGTATVTPQPTTYYESINYDKGFFQTKVLIATKIEHNQVAQHETPVTIARYNPDLDDGSDTAVWLTSIISDSHWSQPKDKDLIIVGRPLWMALYGMWNYVIKHKQDKNFLRSYMFVVQSSAIKLVNNTSQKVFPILDYSFITGKMPYGELLTENDKKFWYPSSYKQQETINNIIEVGPYIPKYSNLKESTWELKYMYTCYFKWGGPEIADQPVQNPEKQRTYDVPDTLYKTIQVSDPLKQSCKAMLRAWDYRRGIITSSAIKRMQSHLPIDSSVESDSGETPPKKKKRTAEIPTAQEETQEIQSCLRSLFEEDTCQDPQNLQHLIEFQQQQQQKLKHNIIKLLIDLKKKQRILQLQTGVE

SEQ ID NO: 5049 - protein, 118 aa, Gammatorquevirus sp.
MSRFYQRTPYNGDTKNQMWMSMISDGHDIFCGCTQPFAHLLDSIFPEGHSDRDKPISFIIKRDIQQCLSGGSEETNHGLPLGASAGNLEDIKQEEEDLGDADDLLMAAVAAAEENQQR

SEQ ID NO: 5050 - protein, 108 aa, Gammatorquevirus sp.
LSPLTLRRRYMPRPTKPPAPHRVPAAAAAETQAQHYQAPHRPEEKTENTTTANRCRMTPFKKGFEMDTEKELAHAFSRPPRMFKEDPPFYPWLPKLTPIVNFHLNYKF

SEQ ID NO: 5051 - DNA, 2501 bp, Gammatorquevirus sp.
tagcggtgtttgtttatataagtttacaccccaaaggggcaattcgggctagggcagtctagcggaacgggcaagaaacttaaaacaatgtttgttttacagatgtcaaagatccaaagctctgacttttatactgccacaccctttaatccggagacaaagactcagatatggatgtctcaaattgctgattctcacgacaatatctgccattgtactcacccctttgctcatctgcttgccagtatctttcctgtgggtcaccaagataggaataaaacaattaatgaaatacttttaagagactacaaagaaaaatgccattctggtggaggagaagaaaaaagccatggtacggacgttggagaaacagaaggaggtttcaaaggtataaaagaagaaaacccagaagaagatttaccaggagaagaaatagaacgactgctcgccgccgtagaagacgcagatacaaggtaagaagaaagaaaaaaaaaattcctatctttcagtggcaacctgactctatacttaaatgccacataaaaggaaacggacttctagtactaggatgtgagggcacccaaatgtactgttatactaaagaaaagtttaaatatatacctcctaaagttccatatgggggaggattgggagttgaaaaatttacccttaattacttatatgaagaatacacataccacaacaatatatggacagctagtaatttatacaaagacttaacaagatatctctattgtagatttactttttacagacatccagacactgactttataataaaatacaatagacaaccaccatttgaaataactaagtggacatatccagcatcacatccacacctactactattagaaaaacataaaaaaattattttaagccaacaaagtaaaccaaatggaagatataaagtaaaagttttaattaaaccacccaaacaaatgctaacaaaatggttttttacaaaacaatttgctgactttggattgctactattaactggagcagcactaaaccttagatattcacatttaagtgcttctaatgaaaatttactagttaacataacaagtttaaatcctatgttttacactcatacaaattgggcatctgctcatgcagctacacaaccatacaaaccatggacaaacatatcacaaagcttacagtacaaggcatatgttaggcagcaaggaggcttaattttacaacaatttcccctaccaaacaacataactacaaatgctgaaacagctatatcatatgaaaacgggtggttctctagcaaaattttaaaagctgttgaatgggtatccccaccaacaacacaagcagttaaaaatattatttatggaagatacaaccccacaaaagataaaggaccaggaaacaaaatatacattattagtatattagcagacacttggggaccaccccaacatgataaaatggtactactagaagatttaccactatggttaggcatatatggttacattagctatttacaaactgttaaaccaggagactggctagcatcatctttagtagttttacaaagtgaagccatttactgttacaatatgataggtgcctgcacaacttgggcacctatagatcaaccttatatagatggtaaacaaccctatgatttacccattaaagaagtagacaaaaaaaaatggtatcctaactacaaatggcaattgcaaacactaaatgccattgtagaatcaggaccatttataccacaatataatgaagaaaagtattctacctgggaactaaaataccactatgacttttgttttaagtggggtggaccagctatgccagacaaagatgttaaagacccaaaagaccttaaaatctatgatgtccccgataaacaattcggcagactacaaatctgcaacccagcaaaacaagccacagaaacaatattccatccctgggatagcaggaggggacttattaaagaaacagctcttaaaagaatgtgcgaacacctcgaaactgatacagaatttcaatattcttcagaagaagcttcgccaaaaaagaaaaaggcaagagtgggagcagcccttacaaacccctaccaagaggaggaagaaatccagaagtgtctccagacactctgcgaaaaaaatacctaccaaagccaaaaccaagaaatccaagacctcatcaagcagcagcaggaccaccagcagcagctcaagtatcacatcctcaagctcctcatagacctgaaaaccaaacagagacaaatacaactacacacaggaatggtagagtaactttaacaagatttaaaccaggatatgaatgggacacagaagttgaactagcaaaagcatttaaaagaccacccagactctttaaagaagacacacccttttacccctggttaccccgacctgaaccccttgttaactttcaccttaattttaaattctaggccgacactgttcact

SEQ ID NO: 5052 - protein, 668 aa, Gammatorquevirus sp.
MPFWWRRRKKPWYGRWRNRRRFQRYKRRKPRRRFTRRRNRTTARRRRRRRYKVRRKKKKIPIFQWQPDSILKCHIKGNGLLVLGCEGTQMYCYTKEKFKYIPPKVPYGGGLGVEKFTLNYLYEEYTYHNNIWTASNLYKDLTRYLYCRFTFYRHPDTDFIIKYNRQPPFEITKWTYPASHPHLLLLEKHKKIILSQQSKPNGRYKVKVLIKPPKQMLTKWFFTKQFADFGLLLLTGAALNLRYSHLSASNENLLVNITSLNPMFYTHTNWASAHAATQPYKPWTNISQSLQYKAYVRQQGGLILQQFPLPNNITTNAETAISYENGWFSSKILKAVEWVSPPTTQAVKNIIYGRYNPTKDKGPGNKIYIISILADTWGPPQHDKMVLLEDLPLWLGIYGYISYLQTVKPGDWLASSLVVLQSEAIYCYNMIGACTTWAPIDQPYIDGKQPYDLPIKEVDKKKWYPNYKWQLQTLNAIVESGPFIPQYNEEKYSTWELKYHYDFCFKWGGPAMPDKDVKDPKDLKIYDVPDKQFGRLQICNPAKQATETIFHPWDSRRGLIKETALKRMCEHLETDTEFQYSSEEASPKKKKARVGAALTNPYQEEEEIQKCLQTLCEKNTYQSQNQEIQDLIKQQQDHQQQLKYHILKLLIDLKTKQRQIQLHTGMVE

SEQ ID NO: 5053 - protein, 129 aa, Gammatorquevirus sp.
MFVLQMSKIQSSDFYTATPFNPETKTQIWMSQIADSHDNICHCTHPFAHLLASIFPVGHQDRNKTINEILLRDYKEKCHSGGGEEKSHGTDVGETEGGFKGIKEENPEEDLPGEEIERLLAAVEDADTR

SEQ ID NO: 5054 - protein, 107 aa, Gammatorquevirus sp.; identical to SEQ ID NO: 4519

SEQ ID NO: 5055 - DNA, 2501 bp, Gammatorquevirus sp.
gtttgcaccccaatgagtgaaaccaccgaggtctaggggcaactcgggctagggcagtctagcggaatgggcaaaaaacttaaaatgttatatgttttcagatgcaaaatttgggacctgaagactactacaaaaaactgcacatataatgcccagacgaaaaaccaactgtggatgtctcaaattgctaattctcatgatatatggtgcagttgtactactccatttgctcaccttatttcttccatttttcctcctggccatcaagataggaaccttactgtacaacaaattctaacaagagattttacagaatgccattctggtggagaaggagaagaaaaccctggtataccaataactacagggcatacagaaaacggcgttggcctaaaagaagaagaagaagagtatataaaagacgaagacctacaaaaacttatagacgtcggagaagacgccgcaggcacaaggtaagaagaaaaaaacctaatattattgtaagacaatggcagccaaactctattagaaaatgtaaaattagaggcatgggaaaacttgttataggagcagaagaaacccaaatagacaattttactatagtacaacatgactttgtacctccaaaagttccatggggaggtggctcaggccttgaaaatattacccttgactacctatatgaagaatatacttttaaaaacaacatttggaccacaagcaatgtattcatgaacctttgcagatacctatactgtaaaatatgcttttttagacacgtagaaacagactttgttatagcctataacagacaaccaccatatgactttaacaaatattcaataccaggctgtcacccacaacaactactactagagaaaagaaagattattctgttaagccaggctagcaaacaaaatggcaaatacaaaaaaacaataaaaattaagccaccaaaacaaatgatcagtaaatggttttttacaaaagacttttcaggccaaactttgcttatactaaaagcctcagcagctagctttagatactcctatttaagtagaacaaatgaaaacatgctatgcactatatactcattaaatccttcattttatgaagacactagctggcaacaagctagagacaaagactattacaaaccataccctacagttccaaacccttttgcttacacagacaaagaaggtagattaaaaaaaattaacatagaaactagcacaacatgcacagatctatacacatgttctgtatcttatacagatggatggtttaatccaagttttttacaagctagatcacttcaagaaaaaacaggtacacagccaaaagcagtacatcaagtaattgcctctagatataaccctaacagagacaaaggacctggaaacaaaatatactgcatatctacattacaaactagctggaccaacccatcagacaaagacttagtaatagaagacatgccactatggttaggcctatatggctactatagctatattacctttaaaaaaccaacagactgggaaaaatcacatgttatagtgatacaatctccagcaatttattgctacccagaaataggatcctgtaaatattactgtcccatagatatagaatacattaaaggaaataaaccctatgggcaacctattactcctaccatgaaaaacagatggatgccagacatgacctggcaaaaaaaaacacttaactgtatagtagaaagtggtccttttgtacctcaatactcagaagagacatctagcagctgggaactaaaatacaattactcatttttttttaagtggggcggaccccttacacctgaccaacaaattaaagatccacaaaagcttgacacctatgatgtacccgatactatccaagacacaatacaaattgtcaacccagccaaacaaacagcagaaaatttactttacccctgggactacagacggggtattattaaagaaaaagctcttaaaagaatgtcagaatactgcctcactaattcagaatttcaaccagttacagaagagcctcaaatcaaaaaacagagacttggagccctaccaaaagacccggagaaagaagtccaagaaatgcagacctgtctccaaacactctgcaaaaaaaatatcttgccagagcaagaagaccaaacactccagcagctcatccaccagcagcagcagcaccaggagcagatcaagtacagcatcgtcaagctcctgatggatttgaaggaaaaacaaacagctcttcaatatcacacaggactgttaaactaaccttattcaaacctgggtttgaacaagaaacagaatatcagttagcacaagcatttaaaagacctgttagaaaatataaagaagactcacccttttatccctggttaccaccaacccccattgtacaatttaaccttaacttcaaagactaggccgacactgttcacttagcggagtctgtttatataa

SEQ ID NO: 5056 - protein, 665 aa, Gammatorquevirus sp.
MPFWWRRRRKPWYTNNYRAYRKRRWPKRRRRRVYKRRRPTKTYRRRRRRRRHKVRRKKPNIIVRQWQPNSIRKCKIRGMGKLVIGAEETQIDNFTIVQHDFVPPKVPWGGGSGLENITLDYLYEEYTFKNNIWTTSNVFMNLCRYLYCKICFFRHVETDFVIAYNRQPPYDFNKYSIPGCHPQQLLLEKRKIILLSQASKQNGKYKKTIKIKPPKQMISKWFFTKDFSGQTLLILKASAASFRYSYLSRTNENMLCTIYSLNPSFYEDTSWQQARDKDYYKPYPTVPNPFAYTDKEGRLKKINIETSTTCTDLYTCSVSYTDGWFNPSFLQARSLQEKTGTQPKAVHQVIASRYNPNRDKGPGNKIYCISTLQTSWTNPSDKDLVIEDMPLWLGLYGYYSYITFKKPTDWEKSHVIVIQSPAIYCYPEIGSCKYYCPIDIEYIKGNKPYGQPITPTMKNRWMPDMTWQKKTLNCIVESGPFVPQYSEETSSSWELKYNYSFFFKWGGPLTPDQQIKDPQKLDTYDVPDTIQDTIQIVNPAKQTAENLLYPWDYRRGIIKEKALKRMSEYCLTNSEFQPVTEEPQIKKQRLGALPKDPEKEVQEMQTCLQTLCKKNILPEQEDQTLQQLIHQQQQHQEQIKYSIVKLLMDLKEKQTALQYHTGLLN

SEQ ID NO: 5057 - protein, 136 aa, Gammatorquevirus sp.
MGKKLKMLYVFRCKIWDLKTTTKNCTYNAQTKNQLWMSQIANSHDIWCSCTTPFAHLISSIFPPGHQDRNLTVQQILTRDFTECHSGGEGEENPGIPITTGHTENGVGLKEEEEEYIKDEDLQKLIDVGEDAAGTR

SEQ ID NO: 5058 - protein, 110 aa, Gammatorquevirus sp.
LSPNTLQKKYLARARRPNTPAAHPPAAAAPGADQVQHRQAPDGFEGKTNSSSISHRTVKLTLFKPGFEQETEYQLAQAFKRPVRKYKEDSPFYPWLPPTPIVQFNLNFKD

SEQ ID NO: 5059 - DNA, 2500 bp, Gammatorquevirus sp.
cccaaaaaaattgtaaaataaaaaaaaaaaaaaaaggggcaattcgggctagggcagtctagcggaacgggcaagaaacttaaaacaaatattattttacagatgcaaaacttatgctcagctgacttctataaatctacaccatacaatccagacacaaaaactcaaatatggatgtcaatgattgctgatggacatgacaatatctgcaactgctggcatccttttgctcatttgcttgctactatttttcctcctggccatcaagacagggatcttaccattaatcaaatacttgcaagagattacttggaagcatgccgttctggtggagaagacggagaaagaactggtggggcagagtatacagaagaccaacatacaaaagatataaaagaagaaaaacaaacagaagaaactatagaagacgcccttatggtcgccgccgccgccgccgcagaaggaccagacgcaaggtaagaaagaagctacaaaaaataactgttaaacaatggcaaccagactcaatagtaaaatgtaaaattaaaggctttgatacacttgtagctggatctgaaggtagacaaatgttttgctacacaaatgaaaaatctgtttttacacagccaaaagcccctggtggtgggggatttggaattaaagtttatagccttcaatacttataccaagaatggcttaaaaagaacaacatatggacaaaatctaatgattacaaagacttagtaagatttactggtgctactttcacattttttagaagcccaactacagactttgttgttcaatatagcagacagcctccatttatagtacaaaaagaaacatacatgaactgccacccacaagctttactacttacaaagaaccacagagttattttaagtactaaatcaaaacctaatggtagaattaaaacaagagtaaaaattaaaccaacaaaacaaatggtaactaaatggttttttcaagatgaatttagtaaatatgacttatttcaaattcaagcagcagcagttgactttaactacccacaatggggtcctaatacatcaagcacaaacctaacattttatgcacttaacacaggcttttaccataacacagactgggctcaaacaccacacggctcacaaggttataaaccatacagaggatacacagatgctgctgttacctatgaataccctaccaaacaaggagcttcaggaaacttccacacacaaacagacacttatgacaaatcaataaactatacaactggtatgtttgctaaagaagtattaaatgcaacaaaaataaaaggacctacatcttatacacatgaaagaccaattactattgccagatacaatccagatgaagacacaggcacaggcaactctgttttttttacctcagtagtagcagacacaggctgggcagaaccaaaagacacagatctagttatacacaatgtacccttatatatagccctatttggcttttggaacacaatcataaaattaaaaggagacaaggcatacatgaaatatgggatgtttgtagttaaatcaaatgcaataaaactagtaacaaacacagcacaaacttatttcccactactagactggtcctttatacaaggtaaaatgccatatgaagaatatcttttagattcagacaaaaacttttggtaccctacagcatacaaacaacaagagattttaaatgctattgtagaatgtggacagtttataccaaagtttggtaacttaccatctagttcatggcaactaaatgttaaatacacattttattttaagtggggtggcccacacatcacagatcaacttgcaaccaatcctaaagacaaagaaaaatatcccgtgcccgatacaatctttcaaacaatacaaattgctgacccacacaagcaagcatgcaaagaaatgcttagagcctgggactacagaaggggcctcattacaagctcagctcttaaaagaatgtcagaaaacatccaaactgattcatctctcgaatctgatgacacagaaacaccaaaaaagaaaaggagagtcacaggagaagtcccatcagcacaagaaaagaaccaaaagatccagaaacatctcctctcactcttcgaagaaagtacctgccaagaggaggaggacctccacaagctcatccagcaccagcagcaacagcagcacaagctcaaacaaaacatcatccacctcctcatagacctaaagaaacaacagagatacctacaacttcaatcgggaggaaactaaccagatttgcacctggccacgaatggcaaactgaacaagatgtagcagcagcatttaaaagaccccctagactctttaaagaagataaacccttttatccttggttacccaaatatgaaccccttgtaaactttcaccttaattttaagttctaggccgacactgttcacttagcggtgtatgtttatataagtttgcac

SEQ ID NO: 5060 - protein, 660 aa, Gammatorquevirus sp.
MPFWWRRRRKNWWGRVYRRPTYKRYKRRKTNRRNYRRRPYGRRRRRRRRTRRKVRKKLQKITVKQWQPDSIVKCKIKGFDTLVAGSEGRQMFCYTNEKSVFTQPKAPGGGGFGIKVYSLQYLYQEWLKKNNIWTKSNDYKDLVRFTGATFTFFRSPTTDFVVQYSRQPPFIVQKETYMNCHPQALLLTKNHRVILSTKSKPNGRIKTRVKIKPTKQMVTKWFFQDEFSKYDLFQIQAAAVDFNYPQWGPNTSSTNLTFYALNTGFYHNTDWAQTPHGSQGYKPYRGYTDAAVTYEYPTKQGASGNFHTQTDTYDKSINYTTGMFAKEVLNATKIKGPTSYTHERPITIARYNPDEDTGTGNSVFFTSVVADTGWAEPKDTDLVIHNVPLYIALFGFWNTIIKLKGDKAYMKYGMFVVKSNAIKLVTNTAQTYFPLLDWSFIQGKMPYEEYLLDSDKNFWYPTAYKQQEILNAIVECGQFIPKFGNLPSSSWQLNVKYTFYFKWGGPHITDQLATNPKDKEKYPVPDTIFQTIQIADPHKQACKEMLRAWDYRRGLITSSALKRMSENIQTDSSLESDDTETPKKKRRVTGEVPSAQEKNQKIQKHLLSLFEESTCQEEEDLHKLIQHQQQQQHKLKQNIIHLLIDLKKQQRYLQLQSGGN

SEQ ID NO: 5061 - protein, 125 aa, Gammatorquevirus sp.
MQNLCSADFYKSTPYNPDTKTQIWMSMIADGHDNICNCWHPFAHLLATIFPPGHQDRDLTINQILARDYLEACRSGGEDGERTGGAEYTEDQHTKDIKEEKQTEETIEDALMVAAAAAAEGPDAR

SEQ ID NO: 5062 - protein, 98 aa, Gammatorquevirus sp.; identical to SEQ ID NO: 1684

SEQ ID NO: 5063 - DNA, 2500 bp, Gammatorquevirus sp.
caccccaaaaaaattgtaaaataaaaaaaaaaaaaaaggcaattcgggctagggcagtctagcggaacgggcaagaaacttaaaacaatatttgttttacagatgcaaaatttatctgcaaaagacttctttaaagctacaccatttaaccaagaaactaaaactcaaatatggatgtctcaaattgctgattcccatgacaatatctgccactgcaacagtccttttgctcacctgcttgctagtatttttcctcctggtcataaagacagggatcttacaattaatcaaattctgcaaagagactacaaagcacaatgcctttctggtggaagaggagaagaaagccatggtatggcagattcagatataaaagaagaaaaacctacagaagaagaaagagaagattccctcgcaggcgcagatatagaagatctactcgccgccgccgacgcaggaaggtaagaagaaaacttaaaaaaattactattaaacagtggcagccagaaagcataactaaatgtaaaattattggctactcaacattagtacttggagcagaaggcagacaatacttatgctggacaaatgaagctagtgaatatgtacagccaaaagccccagggggtgggggttttggatgtgaacttataactttagaatggctttatacagaatacaaagcacacaacaacatatggactagatccaaccaaaacaaagacttagttagatacacaggctgtgaaataactttgtttagacatgaaacaactgattttatattttcatacatcatacaacctccatttaacataacaaaatttacatatggagacatacatcctcaaaacatgctactaagaccacaccacaaaataatattaagtagaagaagtaagcctaatggaaagctaagagttaaagttaaaataaaaccaccaaaacagatgtctactagatggttttttgcaaaagaattttctgaagcaggcctcgtactgttacaagctgctgcatgtgattttaactttcctagaattagtccagtatctcaaagccagatggttacagtatactatttaaacacagacttttaccctaccccaaactggggacaagctcatgatactccttggcttccctatccaacaaaaacaggtgtgtggacttttaaaaatcaaaaaagtaaccctccaattaatttaacctttaacacctccgattttggtgaaggatcagtaggctatacaaactcaattagcagacaacaaggctggtttagaccagaaatattaaatgccagcactgtaatatatgcaggtaaacaatatggatccctaccaatacaatcagccagatacaacccaaatgaagataaaggaccaggaaatgaagtatatgccatgtcagtagtaataggatcctacaggccaccacaataccaaacagactatgttataagaggccaaccactatggatggcattttatggattttacagctttttaaaatacacatcaaaagataaatattttatggaccactacatgtttgtagtatccagcccagccattaaacctatatcacaaacaagtaaacaaacaatatatcccatacttgatccagcctttatagctggcaaattaccatttgatgaatatttagatgacaacacaaaaaaagtatggtttccaaaagcaagatttcaaacacaaatagtaaatgcctttgtagaagcaggcccatttataccaagatacacaaatattaaatatagcacttgggaactaggctacaaatataaattttattttaaatggggtggtccacaggttacagaacacccagttgatgaccctaagcaacaagcagactaccctgtacccactctcctgcaagaaagactacaaatatccaatccacaaaaacttgccacagaatccctgttacacgagtgggatttcagaagggggattgttacacaaaaagctcttaaaagaatgcaggagaaccttgaaattgaaacagatttcgaatctgatgactcaggaacaccacagaaaagaagaaaagtcaccaaagaaataccacaaatacagaaaaaagaagagaagctccacaaatgtctccaacagctctgcgaagaaaatatctgccaagaaaccccacaaacactccaagagctcatcgtccagcagcagcagcaacagcagcagctcaagctcaacatcctcaagctcctcacagagttgaagaaggagcaacgctttttaggccttcaaacaggcctactagaatgactccctttaaaaaagggtttgaaatggacacagaaagagagttagcacaagcatttaaaagaccacctagaatgtttaaagaagacacccctttttacccctggttacccagaccaacacccattgttaactttcaccttaattttaaattctaggcctccaactttcacttagtggtggatgtttatataagtttg

SEQ ID NO: 5064 - protein, 661 aa, Gammatorquevirus sp.
MPFWWKRRRKPWYGRFRYKRRKTYRRRKRRFPRRRRYRRSTRRRRRRKVRRKLKKITIKQWQPESITKCKIIGYSTLVLGAEGRQYLCWTNEASEYVQPKAPGGGGFGCELITLEWLYTEYKAHNNIWTRSNQNKDLVRYTGCEITLFRHETTDFIFSYIIQPPFNITKFTYGDIHPQNMLLRPHHKIILSRRSKPNGKLRVKVKIKPPKQMSTRWFFAKEFSEAGLVLLQAAACDFNFPRISPVSQSQMVTVYYLNTDFYPTPNWGQAHDTPWLPYPTKTGVWTFKNQKSNPPINLTFNTSDFGEGSVGYTNSISRQQGWFRPEILNASTVIYAGKQYGSLPIQSARYNPNEDKGPGNEVYAMSVVIGSYRPPQYQTDYVIRGQPLWMAFYGFYSFLKYTSKDKYFMDHYMFVVSSPAIKPISQTSKQTIYPILDPAFIAGKLPFDEYLDDNTKKVWFPKARFQTQIVNAFVEAGPFIPRYTNIKYSTWELGYKYKFYFKWGGPQVTEHPVDDPKQQADYPVPTLLQERLQISNPQKLATESLLHEWDFRRGIVTQKALKRMQENLEIETDFESDDSGTPQKRRKVTKEIPQIQKKEEKLHKCLQQLCEENICQETPQTLQELIVQQQQQQQQLKLNILKLLTELKKEQRFLGLQTGLLE

SEQ ID NO: 5065 - protein, 120 aa, Gammatorquevirus sp.
MQNLSAKDFFKATPFNQETKTQIWMSQIADSHDNICHCNSPFAHLLASIFPPGHKDRDLTINQILQRDYKAQCLSGGRGEESHGMADSDIKEEKPTEEEREDSLAGADIEDLLAAADAGR

SEQ ID NO: 5066 - protein, 110 aa, Gammatorquevirus sp.
MSPTALRRKYLPRNPTNTPRAHRPAAAATAAAQAQHPQAPHRVEEGATLFRPSNRPTRMTPFKKGFEMDTERELAQAFKRPPRMFKEDTPFYPWLPRPTPIVNFHLNFKF

SEQ ID NO: 5067 - DNA, 2500 bp, Gammatorquevirus sp.
gtctagcggaacgggcaagaaacttaaaacaatactttgttttacagatgcaaaatatttctgcagcagacttttttactccaacaaaatacaacagtgatacaaaaaatcaaatatggatgtccattattgcagatggccatgatggtatctgtgactgcgaccacccttttgctcacctgcttagctctatttttcctcctggtcatcaagaccgtgacctcacaattaatcaaatactgcaaagagattataaagaaaaatgccattctggtggaggaggcgaaggagaccatggttcggcagacgccgcaagagatttaccttcaggagatataaaacaagaagaagaagaatacccagaagaagaactagaaggccttatcgccgccgcagaagaaagaggcgcaaggtaagaagaaaaaggagaaaacttaatatacaacagtggcagccagactctattagaaaatgtaaaattattggtgttggtaacttagttgttggagctcaaggaaaacaattactatgctatacaactgtaaaagctaaatccacaccagcaaaagctcctatgggaggtggttttggggtagaaaaatttactatgtcttacctatatgaagaacacatattcagaaacaacatatggacatgttcaaacataatacttgacctagttagataccttggtgttgaatttactttctatagacatcaaaatattgactttattatacagtatgaaagacaaccaccatttgaaatacaaaaagacacatatatgctaacacatccacaacaaatgttactacaaaaacataaaattgttttacttagcactaaatctaaaccaaatggtaaaatcaaaaagaaaaaatttataagaccacctaaacaaatgataactaaatggttttttcaaaatgactttgcaccagctgcattacttctccttagaggagcagctgcagactttagattttcatacctaggttgctgtaacacaaaccaagaagtcagctttttttatcttaacacagacttttatcaaaatggaaactggggagcacaatcagcaacagcatatcttccatacaatgccatacctgccattcttaattacaaagtaaaagacaaaagttattccattaacaaacctacaacaactaccgctgctcactcaccatatgaccagtcagtttcttatgaaactggctactttcaacctactttattacaagccactgaaataactggttcttctggcctacccactgccacattaccattaaatgtttctagatataatcctaaccaagacagtggcagaggtaacaaaatataccttacatctatactcacaacaggatatgatccaccactaacagacctcacagtacttatacaagaagtgccactatggctaggcctatatggatacttaagctggataacaacaattaaaaaagacaaaacatttttagaaagtcactgtgtagtcctacaatcatcagcaatatatccatatgcccaaataggtgtaaaaaacttttttatacctatagatgaaacaatggtaaatggaaaagctccatatgatgaatatttaacaaaaaaaatgaaacagttttggtacccttcagtactacaccaaatacaaaccttaaatgctatagtaacagcaggaccatacataccaaaactagcaaacacaaaagaaagtacttgggaactaaaatactcttacaaattttatttaaagcttggaggaccacaaatcacagacaaccaaattgttgacccaaaagcacagcacaaataccctactcccgatactttctaccagacaatacaaatcaaaaacccggccaaacaaacacctgaatccattttacaaccctgggactacagaaggggagttattacaaaatcagctcttaaaagaattcgagaaaacatcgaaactgatacagatttcgaaccaatttcagaacatcaacccccaaaaaagaaagagagaaaaggagcagctctcactctccacgaagaagaggaggaagatctccaagcctgtctccagagtctctgcgaagaaaatatcttccaagaaacacaagagccgcaaacactcaagcagctcatcatcgagcagcagcagtatcagtacaacctcaagtacaacctcctaaaagtattgtcagaaatgaaagccaaacaaagacaactacaactacaaacgggactattcaactaacaaaatttaaaccaggctttgaacaacaaacagaatgggaactttcctgtgcttttttaagaccacccagaacttataaagaagatacccccttctatccatggctacctaaccctgtaccccgagttaactttcaccttaactataaattctaggccgacactgtacacttagtaaagcatgtttattaaagtttgcaccccaaaaaaattgtaaaaaaaaaaaaaaaaaaaataaaaaatt

SEQ ID NO: 5068 - protein, 664 aa, Gammatorquevirus sp.
MPFWWRRRRRPWFGRRRKRFTFRRYKTRRRRIPRRRTRRPYRRRRRKRRKVRRKRRKLNIQQWQPDSIRKCKIIGVGNLVVGAQGKQLLCYTTVKAKSTPAKAPMGGGFGVEKFTMSYLYEEHIFRNNIWTCSNIILDLVRYLGVEFTFYRHQNIDFIIQYERQPPFEIQKDTYMLTHPQQMLLQKHKIVLLSTKSKPNGKIKKKKFIRPPKQMITKWFFQNDFAPAALLLLRGAAADFRFSYLGCCNTNQEVSFFYLNTDFYQNGNWGAQSATAYLPYNAIPAILNYKVKDKSYSINKPTTTTAAHSPYDQSVSYETGYFQPTLLQATEITGSSGLPTATLPLNVSRYNPNQDSGRGNKIYLTSILTTGYDPPLTDLTVLIQEVPLWLGLYGYLSWITTIKKDKTFLESHCVVLQSSAIYPYAQIGVKNFFIPIDETMVNGKAPYDEYLTKKMKQFWYPSVLHQIQTLNAIVTAGPYIPKLANTKESTWELKYSYKFYLKLGGPQITDNQIVDPKAQHKYPTPDTFYQTIQIKNPAKQTPESILQPWDYRRGVITKSALKRIRENIETDTDFEPISEHQPPKKKERKGAALTLHEEEEEDLQACLQSLCEENIFQETQEPQTLKQLIIEQQQYQYNLKYNLLKVLSEMKAKQRQLQLQTGLFN

SEQ ID NO: 5069 - protein, 122 aa, Gammatorquevirus sp.
MQNISAADFFTPTKYNSDTKNQIWMSIIADGHDGICDCDHPFAHLLSSIFPPGHQDRDLTINQILQRDYKEKCHSGGGGEGDHGSADAARDLPSGDIKQEEEEYPEEELEGLIAAAEERGAR

SEQ ID NO: 5070 - protein, 112 aa, Gammatorquevirus sp.
LSPESLRRKYLPRNTRAANTQAAHHRAAAVSVQPQVQPPKSIVRNESQTKTTTTTNGTIQLTKFKPGFEQQTEWELSCAFLRPPRTYKEDTPFYPWLPNPVPRVNFHLNYKF

SEQ ID NO: 5071 - DNA, 2500 bp, Gammatorquevirus sp.
ggcaattcgggctagggcagtctagcggaacgggcaagaaacttaaaacaatatttgttttacagatgcaaaatttatctgcaaaagacttctttaaagctacaccatttaaccaagaaactaaaactcaaatatggatgtctcaaattgctgattcccatgacaatatctgccactgcaacagtccttttgctcacctgcttgctagtatttttcctcctggtcataaagacagggatcttacaattaatcaaattctgcaaagagactacaaagcacaatgcctttctggtggaagaggagaagaaagccatggtatggcagattcagatataaaagaagaaaaacctacagaagaagaaagagaagattccctcgcaggcgcagatatagaagatctactcgccgccgccgacgcaggaaggtaagaagaaaacttaaaaaaattactattaaacagtggcagccagaaagcataactaaatgtaaaattattggctactcaacattagtacttggagcagaaggcagacaatacttatgctggacaaatgaagctagtgaatatgtacagccaaaagccccagggggtgggggttttggatgtgaacttataactttagaatggctttatacagaatacaaagcacacaacaacatatggactagatccaaccaaaacaaagacttagttagatacacaggctgtgaaataactttgtttagacatgaaacaactgattttatattttcatacatcatacaacctccatttaacataacaaaatttacatatggagacatacatcctcaaaacatgctactaagaccacaccacaaaataatattaagtagaagaagtaagcctaatggaaagctaagagttaaagttaaaataaaaccaccaaaacagatgtctactagatggttttttgcaaaagaattttctgaagcaggcctcgtactgttacaagctgctgcatgtgattttaactttcctagaattagtccagtatctcaaagccagatggttacagtatactatttaaacacagacttttaccctaccccaaactggggacaagctcatgatactccttggcttccctatccaacaaaaacaggtgtgtggacttttaaaaatcaaaaaagtaaccctccaattaatttaacctttaacacctccgattttggtgaaggatcagtaggctatacaaactcaattagcagacaacaaggctggtttagaccagaaatattaaatgccagcactgtaatatatgcaggtaaacaatatggatccctaccaatacaatcagccagatacaacccaaatgaagataaaggaccaggaaatgaagtatatgccatgtcagtagtaataggatcctacaggccaccacaataccaaacagactatgttataagaggccaaccactatggatggcattttatggattttacagctttttaaaatacacatcaaaagataaatattttatggaccactacatgtttgtagtatccagcccagccattaaacctatatcacaaacaagtaaacaaacaatatatcccatacttgatccagcctttatagctggcaaattaccatttgatgaatatttagatgacaacacaaaaaaagtatggtttccaaaagcaagatttcaaacacaaatagtaaatgcctttgtagaagcaggcccatttataccaagatacacaaatattaaatatagcacttgggaactaggctacaaatataaattttattttaaatggggtggtccacaggttacagaacacccagttgatgaccctaagcaacaagcagactaccctgtacccactctcctgcaagaaagactacaaatatccaatccacaaaaacttgccacagaatccctgttacacgagtgggatttcagaagggggattgttacacaaaaagctcttaaaagaatgcaggagaaccttgaaattgaaacagatttcgaatctgatgactcaggaacaccacagaaaagaagaaaagtcaccaaagaaataccacaaatacagaaaaaagaagagaagctccacaaatgtctccaacagctctgcgaagaaaatatctgccaagaaaccccacaaacactccaagagctcatcgtccagcagcagcagcaacagcagcagctcaagctcaacatcctcaagctcctcacagagttgaagaaggagcaacgctttttaggccttcaaacaggcctactagaatgactccctttaaaaaagggtttgaaatggacacagaaagagagttagcacaagcatttaaaagaccacctagaatgtttaaagaagacacccctttttacccctggttacccagaccaacacccattgttaactttcaccttaattttaaattctaggcctccaactttcacttagtggtggatgtttatataagtttgcaccccaaaaaaattgtaaaataaaaaaaaaaaaaaa

SEQ ID NO: 5072 - protein, 661 aa, Gammatorquevirus sp.; identical to SEQ ID NO: 5064

SEQ ID NO: 5073 - protein, 120 aa, Gammatorquevirus sp.; identical to SEQ ID NO: 5065

SEQ ID NO: 5074 - protein, 110 aa, Gammatorquevirus sp.; identical to SEQ ID NO: 5066

SEQ ID NO: 5075 - protein, 25 aa, Artificial Sequence
  Description of Artificial Sequence: Synthetic peptide
  MOD_RES (3)..(3): L or I
  MOD_RES (9)..(9): Any amino acid
  MOD_RES (10)..(10): Any amino acid
  MOD_RES (15)..(15): Any amino acid
  MOD_RES (17)..(17): Any amino acid
  MOD_RES (20)..(20): Any amino acid
  MOD_RES (24)..(24): Any amino acid
LIXRQWQPXXIRRCXIXGYXPLIXC

SEQ ID NO: 5076 - protein, 7 aa, Artificial Sequence
  Description of Artificial Sequence: Synthetic peptide
  MOD_RES (3)..(3): Any amino acid
  MOD_RES (4)..(4): Any amino acid
  MOD_RES (6)..(6): Any amino acid
NYXXHXD

SEQ ID NO: 5077 - protein, 9 aa, Artificial Sequence
  Description of Artificial Sequence: Synthetic peptide
  MOD_RES (4)..(4): Any amino acid
  MOD_RES (5)..(5): Any amino acid
FSLXXLYDZ

SEQ ID NO: 5078 - protein, 18 aa, Artificial Sequence
  Description of Artificial Sequence: Synthetic peptide
  MOD_RES (2)..(2): Any amino acid
  MOD_RES (5)..(5): Any amino acid
  MOD_RES (8)..(8): Any amino acid
  MOD_RES (16)..(16): Any amino acid
NXWTXSNXDLDLCRYXGC

SEQ ID NO: 5079 - protein, 16 aa, Artificial Sequence
  Description of Artificial Sequence: Synthetic peptide
  MOD_RES (2)..(2): Any amino acid
  MOD_RES (5)..(5): Any amino acid
  MOD_RES (9)..(9): Any amino acid
  MOD_RES (11)..(11): Any amino acid
  MOD_RES (13)..(13): Any amino acid
TXPSXHPGXMXLXKHK

SEQ ID NO: 5080 - protein, 10 aa, Artificial Sequence
  Description of Artificial Sequence: Synthetic peptide
  MOD_RES (5)..(5): Any amino acid
  MOD_RES (9)..(9): Any amino acid
IPSLXTRPXG

SEQ ID NO: 5081 - protein, 18 aa, Artificial Sequence
  Description of Artificial Sequence: Synthetic peptide
  MOD_RES (3)..(3): Any amino acid
  MOD_RES (6)..(6): Any amino acid
  MOD_RES (9)..(9): Any amino acid
  MOD_RES (16)..(16): Any amino acid
RIXPPXLFXDKWYFQXDL

SEQ ID NO: 5082 - protein, 8 aa, Artificial Sequence
  Description of Artificial Sequence: Synthetic peptide
  MOD_RES (3)..(3): Any amino acid
  MOD_RES (5)..(5): Any amino acid
LLXIXATA

SEQ ID NO: 5083 - protein, 11 aa, Artificial Sequence
  Description of Artificial Sequence: Synthetic peptide
  MOD_RES (2)..(2): Any amino acid
  MOD_RES (3)..(3): Any amino acid
  MOD_RES (6)..(6): Any amino acid
  MOD_RES (9)..(9): Any amino acid
LXXPFXSPXTD

SEQ ID NO: 5084 - protein, 14 aa, Artificial Sequence
  Description of Artificial Sequence: Synthetic peptide
  MOD_RES (4)..(4): Any amino acid
  MOD_RES (5)..(5): Any amino acid
  MOD_RES (9)..(9): Any amino acid
  MOD_RES (12)..(12): Any amino acid
YNPXXDKGXGNXIW

SEQ ID NO: 5085 - protein, 8 aa, Artificial Sequence
  Description of Artificial Sequence: Synthetic peptide
  MOD_RES (7)..(7): Any amino acid
CPYTZPXL

SEQ ID NO: 5086 - protein, 8 aa, Artificial Sequence
  Description of Artificial Sequence: Synthetic peptide
  MOD_RES (1)..(1): Any amino acid
  MOD_RES (4)..(4): Any amino acid
  MOD_RES (6)..(6): Any amino acid
XFGXGXMP

SEQ ID NO: 5087 - protein, 8 aa, Artificial Sequence
  Description of Artificial Sequence: Synthetic peptide
  MOD_RES (3)..(3): Any amino acid
  MOD_RES (6)..(6): Any amino acid
  MOD_RES (8)..(8): Any amino acid
HQXEVXEX

SEQ ID NO: 5088 - protein, 12 aa, Artificial Sequence
  Description of Artificial Sequence: Synthetic peptide
  MOD_RES (3)..(3): Any amino acid
  MOD_RES (5)..(5): Any amino acid
  MOD_RES (7)..(7): Any amino acid
KYXFXFXWGGNP

SEQ ID NO: 5089 - protein, 8 aa, Artificial Sequence
  Description of Artificial Sequence: Synthetic peptide
  MOD_RES (5)..(5): Any amino acid
HSWDXRRG

SEQ ID NO: 5090 - protein, 7 aa, Artificial Sequence
  Description of Artificial Sequence: Synthetic peptide
  MOD_RES (5)..(5): Any amino acid
AIKRXQQ

SEQ ID NO: 5091 - protein, 8 aa, Artificial Sequence
  Description of Artificial Sequence: Synthetic peptide
  MOD_RES (1)..(1): Any amino acid
  MOD_RES (5)..(5): Any amino acid
  MOD_RES (6)..(6): Any amino acid
XQZQXXLR

SEQ ID NO: 5092 - protein, 9 aa, Artificial Sequence
  Description of Artificial Sequence: Synthetic peptide
  MOD_RES (3)..(3): Any amino acid
  MOD_RES (4)..(4): L or I
  MOD_RES (6)..(6): Any amino acid
  MOD_RES (7)..(7): Any amino acid
PRXXQXXDP

SEQ ID NO: 5093 - protein, 8 aa, Artificial Sequence
  Description of Artificial Sequence: Synthetic peptide
  MOD_RES (5)..(5): Any amino acid
HSWDXRRG

SEQ ID NO: 5094 - protein, 7 aa, Artificial Sequence
  Description of Artificial Sequence: Synthetic peptide
  MOD_RES (5)..(5): Any amino acid
AIKRXQQ

SEQ ID NO: 5095 - protein, 7 aa, Artificial Sequence
  Description of Artificial Sequence: Synthetic peptide
  MOD_RES (4)..(4): Any amino acid
  MOD_RES (5)..(5): Any amino acid
QZQXXLR

SEQ ID NO: 5096 - protein, 7 aa, Artificial Sequence
  Description of Artificial Sequence: Synthetic peptide
  MOD_RES (2)..(2): Any amino acid
KXKRRRR

SEQ ID NO: 5097 - protein, 13 aa, Artificial Sequence
  Description of Artificial Sequence: Synthetic peptide
  MOD_RES (3)..(3): Any amino acid
  MOD_RES (6)..(6): Any amino acid
  MOD_RES (7)..(7): Any amino acid
  MOD_RES (10)..(10): Any amino acid
  MOD_RES (11)..(11): Any amino acid
PIXSLXXYKXXTR

SEQ ID NO: 5098 - protein, 12 aa, Artificial Sequence
  Description of Artificial Sequence: Synthetic peptide
  MOD_RES (3)..(3): Any amino acid
  MOD_RES (10)..(10): Any amino acid
LAXQLLKECXKN

SEQ ID NO: 5099 - protein, 6 aa, Artificial Sequence
  Description of Artificial Sequence: Synthetic peptide
  MOD_RES (4)..(4): Any amino acid
HLNXLA

SEQ ID NO: 5100 - protein, 5 aa, Artificial Sequence
  Description of Artificial Sequence: Synthetic peptide
DRPPR

SEQ ID NO: 5101 - protein, 9 aa, Artificial Sequence
  Description of Artificial Sequence: Synthetic peptide
  MOD_RES (2)..(2): Any amino acid
  MOD_RES (8)..(8): Any amino acid
DXPFYPWXP

SEQ ID NO: 5102 - protein, 7 aa, Artificial Sequence
  Description of Artificial Sequence: Synthetic peptide
  MOD_RES (2)..(2): Any amino acid
  MOD_RES (6)..(6): Any amino acid
VXFKLXF

SEQ ID NO: 5103 - protein, 15 aa, Artificial Sequence
  Description of Artificial Sequence: Synthetic peptide
  MOD_RES (2)..(2): Any amino acid
  MOD_RES (9)..(9): Any amino acid
  MOD_RES (14)..(14): Any amino acid
WXPPVHBVXGIERXW

SEQ ID NO: 5104 - protein, 6 aa, Artificial Sequence
  Description of Artificial Sequence: Synthetic peptide
  MOD_RES (6)..(6): Any amino acid
AKRKLX

SEQ ID NO: 5105 - protein, 10 aa, Artificial Sequence
  Description of Artificial Sequence: Synthetic peptide
  MOD_RES (4)..(4): Any amino acid
  MOD_RES (7)..(7): Any amino acid
  MOD_RES (8)..(8): Any amino acid
PSSXDWXXEY

SEQ ID NO: 5106 - protein, 5 aa, Artificial Sequence
  Description of Artificial Sequence: Synthetic peptide
DRPPR

SEQ ID NO: 5107 - protein, 5 aa, Artificial Sequence
  Description of Artificial Sequence: Synthetic peptide
PFYPW

SEQ ID NO: 5108 - protein, 8 aa, Artificial Sequence
  Description of Artificial Sequence: Synthetic peptide
  MOD_RES (3)..(3): Any amino acid
  MOD_RES (7)..(7): Any amino acid
NVXFKLXF

SEQ ID NO: 5109 - protein, 25 aa, Artificial Sequence
  Description of Artificial Sequence: Synthetic peptide
  MOD_RES (1)..(1): L or I
  MOD_RES (2)..(2): Any amino acid
  MOD_RES (3)..(3): Any amino acid
  MOD_RES (4)..(4): Any amino acid
  MOD_RES (5)..(5): Any amino acid
  MOD_RES (9)..(9): Any amino acid
  MOD_RES (10)..(10): Any amino acid
  MOD_RES (11)..(11): Any amino acid
  MOD_RES (12)..(12): Any amino acid
  MOD_RES (13)..(13): Any amino acid
  MOD_RES (15)..(15): Any amino acid
  MOD_RES (17)..(17): Any amino acid
  MOD_RES (19)..(19): Any amino acid
  MOD_RES (20)..(20): Any amino acid
  MOD_RES (21)..(21): Any amino acid
  MOD_RES (22)..(22): L or I
XXXXXWQPXXXXXCXIXGXXXXWQP

SEQ ID NO: 5110 - protein, 15 aa, Artificial Sequence
  Description of Artificial Sequence: Synthetic peptide
  MOD_RES (2)..(2): Any amino acid
  MOD_RES (4)..(4): Any amino acid
  MOD_RES (5)..(5): Any amino acid
  MOD_RES (6)..(6): Any amino acid
  MOD_RES (8)..(8): Any amino acid
  MOD_RES (9)..(9): Any amino acid
  MOD_RES (10)..(10): Any amino acid
  MOD_RES (11)..(11): Any amino acid
  MOD_RES (13)..(13): Any amino acid
NXWXXXNXXXXLXRY

SEQ ID NO: 5111 - protein, 8 aa, Artificial Sequence
  Description of Artificial Sequence: Synthetic peptide
  MOD_RES (4)..(4): Any amino acid
  MOD_RES (5)..(5): Any amino acid
  MOD_RES (7)..(7): Any amino acid
YNPXXDXG

SEQ ID NO: 5112 - DNA, 71 bp, Artificial Sequence
  Description of Artificial Sequence: Synthetic oligonucleotide
cgggtgccgkaggtgagtttacacaccgmagtcaaggggcaattcgggctcrggactggccgggcyhtggg

SEQ ID NO: 5113 - DNA, 71 bp, Artificial Sequence
  Description of Artificial Sequence: Synthetic oligonucleotide
cgggtgccggaggtgagtttacacaccgcagtcaaggggcaattcgggctcgggactggccgggctwtggg

SEQ ID NO: 5114 - DNA, 71 bp, Torque teno virus
cgggtgccgtaggtgagtttacacaccgcagtcaaggggcaattcgggctcgggactggccgggctatggg

SEQ ID NO: 5115 - DNA, 71 bp, Torque teno virus
cgggtgccggaggtgagtttacacaccgcagtcaaggggcaattcgggctcgggactggccgggccctggg

SEQ ID NO: 5116 - DNA, 71 bp, Torque teno virus
cgggtgccggaggtgagtttacacaccgcagtcaaggggcaattcgggctcgggactggccgggctttggg

SEQ ID NO: 5117 - DNA, 71 bp, Torque teno virus
cgggtgccggaggtgagtttacacaccgcagtcaaggggcaattcgggctcgggactggccgggctatggg

SEQ ID NO: 5118 - DNA, 71 bp, Torque teno virus
cgggtgccggaggtgagtttacacaccgaagtcaaggggcaattcgggctcaggactggccgggctttggg

SEQ ID NO: 5119 - DNA, 71 bp, Artificial Sequence
  Description of Artificial Sequence: Synthetic oligonucleotide
cgggtgccggaggtgagtttacacaccgcagtcaaggggcaattcgggctcgggactggccgggcyhtggg

SEQ ID NO: 5120 - DNA, 71 bp, Torque teno virus; identical to SEQ ID NO: 5114

SEQ ID NO: 5121 - DNA, 70 bp, Torque teno virus
cgggtgccggaggtgagtttacacaccgcagtcaaggggcaattcgggctcgggactggccgggcccggg

SEQ ID NO: 5122 - DNA, 71 bp, Torque teno virus; identical to SEQ ID NO: 5118

SEQ ID NO: 5123 - DNA, 69 bp, Torque teno virus
cgggtgccggaggtgagtttacacaccgcagtcaaggggcaattcgggctcgggaggccgggccatggg

SEQ ID NO: 5124 - DNA, 71 bp, Torque teno virus
cgggtgccggaggtgagtttacacaccgcagtcaaggggcaattcgggctcgggactggccgggccccggg

SEQ ID NO: 5125 - DNA, 71 bp, Torque teno virus; identical to SEQ ID NO: 5117

SEQ ID NO: 5126 - DNA, 71 bp, Torque teno virus
cgggtgccgaaggtgagtttacacaccgcagtcaaggggcaattcgggctcgggactggccgggctatggg

SEQ ID NO: 5127 - DNA, 117 bp, Artificial Sequence
  Description of Artificial Sequence: Synthetic polynucleotide
  misc_feature (10)..(10): May or may not be present
  misc_feature (12)..(12): May or may not be present
  misc_feature (30)..(32): May or may not be present
  misc_feature (34)..(34): May or may not be present
  misc_feature (43)..(46): May or may not be present
  misc_feature (52)..(54): May or may not be present
  misc_feature (70)..(71): May or may not be present
  misc_feature (89)..(90): May or may not be present
  misc_feature (103)..(103): May or may not be present
cggcggsggsgcsscgcgctdcgcgcgcsgcccrsyrggggrdssmmwgcskcscccccccscgcgcatgcgcrcgggkcccccccccyvsggggggctccgcccccccggcccccc

SEQ ID NO: 5128 - DNA, 169 bp, Artificial Sequence
  Description of Artificial Sequence: Synthetic polynucleotide
  modified_base (20)..(20): a, c, t, g, unknown or other
  modified_base (22)..(22): a, c, t, g, unknown or other
  modified_base (40)..(42): a, c, t, g, unknown or other
  modified_base (53)..(56): a, c, t, g, unknown or other
  modified_base (62)..(62): a, c, t, g, unknown or other
  modified_base (64)..(64): a, c, t, g, unknown or other
  modified_base (97)..(98): a, c, t, g, unknown or other
gccgccgcggcggcggsggngnsgcgcgctdcgcgcgcsnnncrccrgggggnnnncwgcsncncccccccccgcgcatgcgcgggkcccccccccnncggggggctccgccccccggcccccccccgtgctaaacccaccgcgcatgcgcgaccacgcccccgccgcc

SEQ ID NO: 5129 - DNA, 79 bp, Artificial Sequence
  Description of Artificial Sequence: Synthetic oligonucleotide
  modified_base (20)..(20): a, c, t, g, unknown or other
  modified_base (22)..(22): a, c, t, g, unknown or other
  modified_base (40)..(42): a, c, t, g, unknown or other
  modified_base (53)..(56): a, c, t, g, unknown or other
  modified_base (62)..(62): a, c, t, g, unknown or other
  modified_base (64)..(64): a, c, t, g, unknown or other
gccgccgcggcggcggsggngnsgcgcgctdcgcgcgcsnnncrccrgggggnnnncwgcsncncccccccccgcgcat

SEQ ID NO: 5130 - DNA, 31 bp, Artificial Sequence
  Description of Artificial Sequence: Synthetic oligonucleotide
  modified_base (18)..(19): a, c, t, g, unknown or other
gcgcgggkcccccccccnncggggggctccg

SEQ ID NO: 5131 - DNA, 59 bp, Artificial Sequence
  Description of Artificial Sequence: Synthetic oligonucleotide
ccccccggcccccccccgtgctaaacccaccgcgcatgcgcgaccacgcccccgccgcc

SEQ ID NO: 5132 - DNA, 156 bp, Torque teno virus
gcggcgggggggcggccgcgttcgcgcgccgcccaccagggggtgctgcgcgcccccccccgcgcatgcgcggggcccccccccgggggggctccgcccccccggcccccccccgtgctaaacccaccgcgcatgcgcgaccacgcccccgccgcc

SEQ ID NO: 5133 - DNA, 7 bp, Torque teno virus
gcggcgg

SEQ ID NO: 5134 - DNA, 7 bp, Torque teno virus
gggggcg

SEQ ID NO: 5135 - DNA, 6 bp, Torque teno virus
gccgcg

SEQ ID NO: 5136 - DNA, 25 bp, Torque teno virus
ttcgcgcgccgcccaccagggggtg

SEQ ID NO: 5137 - DNA, 5 bp, Torque teno virus
ctgcg

SEQ ID NO: 5138 - DNA, 17 bp, Torque teno virus
cgcccccccccgcgcat

SEQ ID NO: 5139 - DNA, 17 bp, Torque teno virus
gcgcggggccccccccc

SEQ ID NO: 5140 - DNA, 72 bp, Torque teno virus
gggggggctccgcccccccggcccccccccgtgctaaacccaccgcgcatgcgcgaccacgcccccgccgcc

SEQ ID NO: 5141 - DNA, 115 bp, Torque teno virus
cggcggcggcggcgcgcgcgctgcgcgcgcgcgccgggggggcgccagcgcccccccccccgcgcatgcacgggtccccccccccacggggggctccgccccccggccccccccc

SEQ ID NO: 5142 - DNA, 14 bp, Torque teno virus
cggcggcggcggcg

SEQ ID NO: 5143 - DNA, 17 bp, Torque teno virus
cgcgcgctgcgcgcgcg

SEQ ID NO: 5144 - DNA, 19 bp, Torque teno virus
cgccgggggggcgccagcg

SEQ ID NO: 5145 - DNA, 17 bp, Torque teno virus
cccccccccccgcgcat

SEQ ID NO: 5146 - DNA, 31 bp, Torque teno virus
gcacgggtccccccccccacggggggctccg

SEQ ID NO: 5147 - DNA, 17 bp, Torque teno virus
ccccccggccccccccc

SEQ ID NO: 5148 - DNA, 121 bp, Torque teno virus
ccgtcggcgggggggccgcgcgctgcgcgcgcggcccccgggggaggcacagcctcccccccccgcgcgcatgcgcgcgggtccccccccctccggggggctccgccccccggcccccccc

SEQ ID NO: 5149 - DNA, 37 bp, Torque teno virus
ccgtcggcgggggggccgcgcgctgcgcgcgcggccc

SEQ ID NO: 5150 - DNA, 84 bp, Torque teno virus
ccgggggaggcacagcctcccccccccgcgcgcatgcgcgcgggtccccccccctccggggggctccgccccccggcccccccc

SEQ ID NO: 5151 - DNA, 104 bp, Torque teno virus
cggcggcggcgcgcgcgctacgcgcgcgcgccggggggctgccgccccccccccgcgcatgcgcggggcccccccccgcggggggctccgccccccggcccccc

SEQ ID NO: 5152 - DNA, 11 bp, Torque teno virus
cggcggcggcg

SEQ ID NO: 5153 - DNA, 17 bp, Torque teno virus
cgcgcgctacgcgcgcg

SEQ ID NO: 5154 - DNA, 10 bp, Torque teno virus
cgccgggggg

SEQ ID NO: 5155 - DNA, 7 bp, Torque teno virus
ctgccgc

SEQ ID NO: 5156 - DNA, 15 bp, Torque teno virus
cccccccccgcgcat

SEQ ID NO: 5157 - DNA, 17 bp, Torque teno virus
gcgcggggccccccccc

SEQ ID NO: 5158 - DNA, 13 bp, Torque teno virus
gcggggggctccg

SEQ ID NO: 5159 - DNA, 14 bp, Torque teno virus
ccccccggcccccc

SEQ ID NO: 5160 - DNA, 122 bp, Torque teno virus
gccgccgcggcggcggggggcggcgcgctgcgcgcgccgcccagtagggggagccatgcgcccccccccgcgcatgcgcggggcccccccccgcggggggctccgccccccggccccccccg

SEQ ID NO: 5161 - DNA, 19 bp, Torque teno virus
gccgccgcggcggcggggg

SEQ ID NO: 5162 - DNA, 41 bp, Torque teno virus
gcggcgcgctgcgcgcgccgcccagtagggggagccatgcg

SEQ ID NO: 5163 - DNA, 15 bp, Torque teno virus
cccccccccgcgcat

SEQ ID NO: 5164 - DNA, 17 bp, Torque teno virus
gcgcggggccccccccc

SEQ ID NO: 5165 - DNA, 13 bp, Torque teno virus
gcggggggctccg

SEQ ID NO: 5166 - DNA, 17 bp, Torque teno virus
ccccccggccccccccg

SEQ ID NO: 5167 - DNA, 36 bp, Torque teno virus
cgcgctgcgcgcgccgcccagtagggggagccatgc

SEQ ID NO: 5168 - DNA, 78 bp, Torque teno virus
ccgccatcttaagtagttgaggcggacggtggcgtgagttcaaaggtcaccatcagccacacctactcaaaatggtgg

SEQ ID NO: 5169 - DNA, 172 bp, Torque teno virus
cttaagtagttgaggcggacggtggcgtgagttcaaaggtcaccatcagccacacctactcaaaatggtggacaatttcttccgggtcaaaggttacagccgccatgttaaaacacgtgacgtatgacgtcacggccgccattttgtgacacaagatggccgacttccttcc

SEQ ID NO: 5170 - DNA, 36 bp, Artificial Sequence; identical to SEQ ID NO: 5167
  Description of Artificial Sequence: Synthetic oligonucleotide

SEQ ID NO: 5171 - DNA, 36 bp, Artificial Sequence
  Description of Artificial Sequence: Synthetic oligonucleotide
gcgctdcgcgcgcgcgccggggggctgcgccccccc

SEQ ID NO: 5172 - DNA, 36 bp, Torque teno virus
gcgcttcgcgcgccgcccactagggggcgttgcgcg

SEQ ID NO: 5173 - DNA, 36 bp, Torque teno virus
gcgctgcgcgcgccgcccagtagggggcgcaatgcg

SEQ ID NO: 5174 - DNA, 36 bp, Torque teno virus
gcgctgcgcgcgcggcccccgggggaggcattgcct

SEQ ID NO: 5175 - DNA, 36 bp, Torque teno virus
gcgctgcgcgcgcgcgccgggggggcgccagcgccc

SEQ ID NO: 5176 - DNA, 36 bp, Torque teno virus
gcgcttcgcgcgcgcgccggggggctccgccccccc

SEQ ID NO: 5177 - DNA, 36 bp, Torque teno virus
gcgcttcgcgcgcgcgccggggggctgcgccccccc

SEQ ID NO: 5178 - DNA, 36 bp, Torque teno virus
gcgctacgcgcgcgcgccggggggctgcgccccccc

SEQ ID NO: 5179 - DNA, 36 bp, Torque teno virus
gcgctacgcgcgcgcgccggggggctctgccccccc

SEQ ID NO: 5180 - protein, 220 aa, Artificial Sequence
  Description of Artificial Sequence: Synthetic polypeptide
  MOD_RES (29)..(31): Any amino acid
  SITE (29)..(31): This region may encompass 0-3 residues
  MOD_RES (100)..(100): Any amino acid
  MOD_RES (125)..(129): Any amino acid
  SITE (125)..(129): This region may encompass 1-5 residues
  MOD_RES (181)..(181): Any amino acid
  MOD_RES (211)..(211): Any amino acid
LVLTQWQPNTVRRCYIRGYLPLIICGENXXXTTSRNYATHSDDTIQKGPFGGGMSTTTFSLRVLYDEYQRFMNRWTYSNEDLDLARYLGCKFTFYRHPDXDFIVQYNTNPPFKDTKLTAPSIHPXXXXXGMLMLSKRKILIPSLKTRPKGKHYVKVRIGPPKLFEDKWYTQSDLCDVPLVXLYATAADLQHPFGSPQTDNPCVTFQVLGSXYNKHLSISP

SEQ ID NO: 5181 - protein, 172 aa, Artificial Sequence
  Description of Artificial Sequence: Synthetic polypeptide
  MOD_RES (38)..(38): Any amino acid
  MOD_RES (44)..(46): Any amino acid
  SITE (44)..(46): This region may encompass 0-3 residues
  MOD_RES (77)..(77): Any amino acid
  MOD_RES (79)..(79): Any amino acid
  MOD_RES (98)..(101): Any amino acid
  SITE (98)..(101): This region may encompass 0-4 residues
SNFEFPGAYTDITYNPLTDKGVGNMVWIQYLTKPDTIXDKTQSXXXKCLIEDLPLWAALYGYVDFCEKETGDSAIIXNXGRVLIRCPYTKPPLYDKTXXXXNKGFVPYSTNFGNGKMPGGSGYVPIYWRARWYPTLFHQKEVLEDIVQSGPFAYKDEKPSTQLVMKYCFNFN

SEQ ID NO: 5182 - protein, 258 aa, Artificial Sequence
  Description of Artificial Sequence: Synthetic polypeptide
  MOD_RES (20)..(22): Any amino acid
  SITE (20)..(22): This region may encompass 0-3 residues
  MOD_RES (25)..(25): Any amino acid
  MOD_RES (78)..(78): Any amino acid
  MOD_RES (89)..(89): Any amino acid
  MOD_RES (91)..(91): Any amino acid
  MOD_RES (95)..(98): Any amino acid
  SITE (95)..(98): This region may encompass 1-4 residues
  MOD_RES (107)..(120): Any amino acid
  SITE (107)..(120): This region may encompass 2-14 residues
  MOD_RES (129)..(129): Any amino acid
  MOD_RES (139)..(168): Any amino acid
  SITE (139)..(168): This region may encompass 0-30 residues
  MOD_RES (201)..(204): Any amino acid
  SITE (201)..(204): This region may encompass 0-4 residues
  MOD_RES (219)..(258): Any amino acid
  SITE (219)..(258): This region may encompass 0-40 residues
WGGNPISQQVVRNPCKDSGXXXSGXGRQPRSVQVVDPKYMGPEYTFHSWDWRRGLFGEKAIKRMSEQPTDDEIFTGGXPKRPRRDPPTXQXPEEXXXXQKESSSFRXXXXXXXXXXXXXXPWESSSQEXESESQEEEEXXXXXXXXXXXXXXXXXXXXXXXXXXXXXXEQTVQQQLRQQLREQRRLRVQLQLLFQQLLKTXXXXQAGLHINPLLLSQAXXXXXXXXXXXXXXXXXXXXXXXXXXXXXXXXXXXXXXXX

SEQ ID NO: 5183 - protein, 214 aa, Artificial Sequence
  Description of Artificial Sequence: Synthetic polypeptide
  MOD_RES (136)..(136): Any amino acid
  MOD_RES (138)..(141): Any amino acid
  SITE (138)..(141): This region may encompass 1-4 residues
  MOD_RES (179)..(179): Any amino acid
LKQWQPSTIRKCKIKGYLPLFQCGKGRISNNYTQYKESIVPHHEPGGGGWSIQQFTLGALYEEHLKLRNWWTKSNDGLPLVRYLGCTIKLYRSEDTDYIVTYQRCYPMTATKLTYLSTQPSRMLMNKHKIIVPSKXTXXXXNKKKKPYKKIFIKPPSQMQNKWYFQQDIANTPLLQLTXTACSLDRMYLSSDSISNNITFTSLNTNFFQNPNFQ

SEQ ID NO: 5184 - protein, 187 aa, Artificial Sequence
  Description of Artificial Sequence: Synthetic polypeptide
  MOD_RES (1)..(10): Any amino acid
  SITE (1)..(10): This region may encompass 4-10 residues
  MOD_RES (38)..(45): Any amino acid
  SITE (38)..(45): This region may encompass 1-8 residues
  MOD_RES (94)..(94): Any amino acid
  MOD_RES (100)..(102): Any amino acid
  SITE (100)..(102): This region may encompass 1-3 residues
  MOD_RES (112)..(112): Any amino acid
  MOD_RES (114)..(115): Any amino acid
  SITE (114)..(115): This region may encompass 0-2 residues
  MOD_RES (124)..(139): Any amino acid
  SITE (124)..(139): This region may encompass 3-16 residues
  MOD_RES (154)..(154): Any amino acid
XXXXXXXXXXTPLYFECRYNPFKDKGTGNKVYLVSNNXXXXXXXXTGWDPPTDPDLIIEGFPLWLLLWGWLDWQKKLGKIQNIDTDYILVIQSXYYIPPXXXKLPYYVPLDXDXXFLHGRSPYXXXXXXXXXXXXXXXXPSDKQHWHPKVRFQXETINNIALTGPGTPKLPNQKSIQAHMKYKFYFK

SEQ ID NO: 5185 - protein, 163 aa, Artificial Sequence
  Description of Artificial Sequence: Synthetic polypeptide
  MOD_RES (34)..(34): Any amino acid
  MOD_RES (65)..(65): Any amino acid
  MOD_RES (77)..(78): Any amino acid
  MOD_RES (86)..(87): Any amino acid
  MOD_RES (96)..(96): Any amino acid
  MOD_RES (102)..(106): Any amino acid
  SITE (102)..(106): This region may encompass 0-5 residues
  MOD_RES (125)..(125): Any amino acid
  MOD_RES (135)..(135): Any amino acid
  MOD_RES (138)..(163): Any amino acid
  SITE (138)..(163): This region may encompass 0-26 residues
WGGCPAPMETITDPCKQPKYPIPNNLLQTTSLQXPTTPIETYLYKFDERRGLLTKKAAKRIKKDXTTETTLFTDTGXXTSTTLPTXXQTETTQEEXTSEEEXXXXXETLLQQLQQLRRKQKQLRXRILQLLQLLXLLXXXXXXXXXXXXXXXXXXXXXXXXXX

SEQ ID NO: 5186 - protein, 203 aa, Artificial Sequence
  Description of Artificial Sequence: Synthetic polypeptide
  MOD_RES (79)..(79): Any amino acid
  MOD_RES (104)..(104): Any amino acid
  MOD_RES (116)..(116): Any amino acid
  MOD_RES (120)..(121): Any amino acid
  MOD_RES (125)..(125): Any amino acid
  MOD_RES (170)..(170): Any amino acid
TIPLKQWQPESIRKCKIKGYGTLVLGAEGRQFYCYTNEKDEYTPPKAPGGGGFGVELFSLEYLYEQWKARNNIWTKSNXYKDLCRYTGCKITFYRHPTTDFIVXYSRQPPFEIDKXTYMXXHPQXLLLRKHKKIILSKATNPKGKLKKKIKIKPPKQMLNKWFFQKQFAXYGLVQLQAAACBLRYPRLGCCNENRLITLYYLN

SEQ ID NO: 5187 - protein, 162 aa, Artificial Sequence
  Description of Artificial Sequence: Synthetic polypeptide
  MOD_RES (12)..(12): Any amino acid
  MOD_RES (20)..(20): Any amino acid
  MOD_RES (23)..(23): Any amino acid
  MOD_RES (30)..(30): Any amino acid
  MOD_RES (58)..(58): I or L
  MOD_RES (84)..(84): Any amino acid
  MOD_RES (90)..(90): Any amino acid
  MOD_RES (95)..(95): Any amino acid
  MOD_RES (105)..(105): Any amino acid
  MOD_RES (111)..(111): I or L
  MOD_RES (113)..(113): Any amino acid
  MOD_RES (154)..(154): Any amino acid
  MOD_RES (156)..(156): Any amino acid
LPIVVARYNPAXDTGKGNKXWLXSTLNGSXWAPPTTDKDLIIEGLPLWLALYGYWSYXKKVKKDKGILQSHMFVVKSPAIQPLXTATTQXTFYPXIDNSFIQGKXPYDEPXTXNQKKLWYPTLEHQQETINAIVESGPYVPKLDNQKNSTWELXYXYTFYFK

SEQ ID NO: 5188 - protein, 177 aa, Artificial Sequence
  Description of Artificial Sequence: Synthetic polypeptide
  MOD_RES (16)..(16): Any amino acid
  MOD_RES (26)..(26): Any amino acid
  MOD_RES (33)..(33): Any amino acid
  MOD_RES (73)..(73): Any amino acid
  MOD_RES (81)..(82): Any amino acid
  SITE (81)..(82): This region may encompass 0-2 residues
  MOD_RES (90)..(90): Any amino acid
  MOD_RES (94)..(94): Any amino acid
  MOD_RES (119)..(124): Any amino acid
  SITE (119)..(124): This region may encompass 1-6 residues
  MOD_RES (168)..(177): Any amino acid
  SITE (168)..(177): This region may encompass 1-10 residues
WGGPQIPDQPVEDPKXQGTYPVPDTXQQTIQIXNPLKQKPETMFHDWDYRRGIITSTALKRMQENLETDSSFXSDSEETPXXKKKKRLTXELPXPQEETEEIQSCLLSLCEESTCQEEXXXXXXENLQQLIHQQQQQQQQLKHNILKLLSDLKZKQRLLQLQTGILEXXXXXXXXXX

SEQ ID NO: 5189 - DNA, 20 bp, Artificial Sequence
  Description of Artificial Sequence: Synthetic primer
gaagcccaccaaaagcaatt

SEQ ID NO: 5190 - DNA, 21 bp, Artificial Sequence
  Description of Artificial Sequence: Synthetic primer
agttcccgtgtctatagtcga

SEQ ID NO: 5191 - DNA, 22 bp, Artificial Sequence
  Description of Artificial Sequence: Synthetic probe
acttcgttacagagtccagggg

SEQ ID NO: 5192 - DNA, 20 bp, Artificial Sequence
  Description of Artificial Sequence: Synthetic primer
agcaacaggtaatggaggac

SEQ ID NO: 5193 - DNA, 20 bp, Artificial Sequence
  Description of Artificial Sequence: Synthetic primer
tggaagctggggtctttaac

SEQ ID NO: 5194 - DNA, 22 bp, Artificial Sequence
  Description of Artificial Sequence: Synthetic probe
tctaccttaggtgcaaagggcc

SEQ ID NO: 5195 - DNA, 156 bp, Torque teno virus; identical to SEQ ID NO: 5132

SEQ ID NO: 5196 - DNA, 150 bp, Torque teno virus
ccgagcgttagcgaggagtgcgaccctaccccctgggcccacttcttcggagccgcgcgctacgccttcggctgcgcgcggcacctcagacccccgctcgtgctgacacgcttgcgcgtgtcagaccacttcgggctcgcgggggtcggg

SEQ ID NO: 5197 - DNA, 122 bp, Torque teno virus; identical to SEQ ID NO: 5160

SEQ ID NO: 5198 - DNA, 111 bp, Torque teno virus
cggcccagcggcggcgcgcgcgcttcgcgcgcgcgccggggggctccgcccccccccgcgcatgcgcggggcccccccccgcggggggctccgccccccggtccccccccg

SEQ ID NO: 5199 - DNA, 115 bp, Torque teno virus
cggccgtgcggcggcgcgcgcgcttcgcgcgcgcgccgggggctgccgcccccccccgcgcatgcgcgcggggcccccccccgcggggggctccgccccccggcccccccccccg

SEQ ID NO: 5200 - DNA, 104 bp, Torque teno virus; identical to SEQ ID NO: 5151

SEQ ID NO: 5201 - DNA, 108 bp, Torque teno virus
ggcggcggcgcgcgcgctacgcgcgcgcgccggggagctctgcccccccccgcgcatgcgcgcgggtcccccccccgcggggggctccgccccccggtcccccccccg

SEQ ID NO: 5202 - protein, 11 aa, Artificial Sequence
  Description of Artificial Sequence: Synthetic peptide
  MOD_RES (4)..(5): Any amino acid
  MOD_RES (7)..(7): Any amino acid
  MOD_RES (9)..(10): Any amino acid
YNPXXDXGXXN

SEQ ID NO: 5203 - protein, 21 aa, Artificial Sequence
  Description of Artificial Sequence: Synthetic peptide
  MOD_RES (1)..(1): W or F
  MOD_RES (2)..(8): Any amino acid
  MOD_RES (10)..(12): Any amino acid
  MOD_RES (14)..(14): Any amino acid
  MOD_RES (16)..(20): Any amino acid
XXXXXXXXHXXXCXCXXXXXH

SEQ ID NO: 5204 - protein, 11 aa, Artificial Sequence
  Description of Artificial Sequence: Synthetic peptide
  MOD_RES (2)..(2): N, C or S
  MOD_RES (4)..(5): Any amino acid
  MOD_RES (7)..(7): Any amino acid
  MOD_RES (8)..(8): G, A, S, K or R
  MOD_RES (9)..(10): Any amino acid
  MOD_RES (11)..(11): N, T, S, V, A or K
YXPXXDXXXXX

SEQ ID NO: 5205 - DNA, 71 bp, Artificial Sequence
  Description of Artificial Sequence: Synthetic oligonucleotide
cgggtgccggaggtgagtttacacaccgcagtcaaggggcaattcgggctcgggactggccgggcymtggg

SEQ ID NO: 5206 - DNA, 36 bp, Artificial Sequence
  Description of Artificial Sequence: Synthetic oligonucleotide
gcgctkcgcgcgcgcgccggggggctgcgccccccc

SEQ ID NO: 5207 - protein, 727 aa, Artificial Sequence
  Description of Artificial Sequence: Synthetic polypeptide
  MOD_RES (36)..(36): Any amino acid
  MOD_RES (170)..(170): Any amino acid
  MOD_RES (246)..(246): Any amino acid
  MOD_RES (276)..(276): Any amino acid
  MOD_RES (361)..(361): Any amino acid
  MOD_RES (371)..(371): Any amino acid
  MOD_RES (436)..(436): Any amino acid
  MOD_RES (685)..(685): Any amino acid
MAWGWWRRRRMAWRRWRRRRRRRRRRRRRRRRRRPXRRRRRRRRVRRRRRGRWRRRRYRRWRRRRRRRRRKKLVLTQWQPNTVRRCYIRCRGYLPLIICGENTTSRNYATHSDDTPQGPFGGGMSTTTFSLRVLYDEYQRFMNRWTYSNEDLDLARYLGCKFTFYRHPDXDFIVQYNTNPPFKDTKLTAPSIHPGMLMLSKRKILIPSLKTRPKGKHYVKVRIGPPKLFEDKWYTQSDLCDVPLVXLYATAADLQHPFGSPQTDNPCVTFQVLGSXKYNKHLSISPTNDNLKHLLNNLYTSGYNTFQTIAQLKPTIDAKNGTTNTTNTTTTGTTFTTTKNDSWYGGNTYNPNIKKLKKIRXYFKKLTKKLXPTYTTPTDYLEYHLGIYSPIFLSPGRSNFEFPGAYTDITYNPLTDKGVGNMVWYIQYLTKPDTIXDKTQSKCLIEDLPLWAALYGYVDFCEKETGDQDIETNGRVLIRCPYTKPPLYDKTDPNKGFVPYSTNFGNGKMPGGSGYVPIYWRARWYPTLFHQKEVLEDIVQSGPPFAYKDDLKSATLTAKYKFKFKWGGNPISQQVVRNPCKDSGSSPPGRGPRSVQVVDPKYMGPEYTFHSWDWRRGLFGEKAIKRMSEQPTDDELFPAGPKRPRRDPPEEQEESSLFLRRRPPWEESSQEESSSEEEEQEEQTXQQQLRQQLREQRQLRVQLQLLFQQLLKTQAGLHINPLLLSQA

SEQ ID NO: 5208 - protein, 22 aa, Artificial Sequence
  Description of Artificial Sequence: Synthetic peptide
  MOD_RES (13)..(13): E, T, I, F, V, K, Q, D, H or P
  MOD_RES (16)..(16): M, I, R, V, K, H, N, Q, E or T
  MOD_RES (17)..(17): L, I, V, T, C or M
YDIRYNPLTDKGXGNXXWLQSL

SEQ ID NO: 5209 - protein, 24 aa, Alphatorquevirus sp.
PYTDITYNPFSDRGEGNMLWIDWL

SEQ ID NO: 5210 - protein, 24 aa, Torque teno virus
AYTDIKYNPFTDRGEGNMLWIDWL

SEQ ID NO: 5211 - protein, 24 aa, Torque teno virus
AYSDIIYNPLTDKGTGNIIWIDYL

SEQ ID NO: 5212 - protein, 24 aa, Torque teno virus
AYTDVIYNPFTDKGTGNMVWIDYL

SEQ ID NO: 5213 - protein, 24 aa, Torque teno virus
AYQDIIYNPFTDKGIGNIVWIDWL

SEQ ID NO: 5214 - protein, 24 aa, Torque teno virus
PYTHVRYNPLVDKGFGNRIYIQWC

SEQ ID NO: 5215 - protein, 24 aa, Torque teno virus
PYTHVRYNPLVDKGFGNRIYIQWC

SEQ ID NO: 5216 - protein, 24 aa, Torque teno virus
AYTEVSYNPWTDEGTGNVVCLQYL

SEQ ID NO: 5217 - protein, 24 aa, Torque teno virus
LYTEIIYNPYTDKGTGNKVWMDPL

SEQ ID NO: 5218 - protein, 24 aa, Alphatorquevirus sp.
AYQDVTYNPNCDRAVGNVVWFQYS

SEQ ID NO: 5219 - protein, 24 aa, Torque teno virus
AYQDVTYNPNCDRGVNNRVWVQPL

SEQ ID NO: 5220 - protein, 24 aa, Torque teno virus
AYQDVTYNPLMDKGVGNHIWFQYN

SEQ ID NO: 5221 - protein, 24 aa, Torque teno virus
AYVDTTYNPLMDKGKGNKIWFQYL

SEQ ID NO: 5222 - protein, 24 aa, Torque teno virus
AYRDIVYNPFLDKAQGNMVWFQYH

SEQ ID NO: 5223 - protein, 21 aa, Torque teno mini virus
ECRYNPFNDKSTGNNTFFVSN

SEQ ID NO: 5224 - protein, 21 aa, Torque teno mini virus
ECRYNPLADKGKGNKIYLISI

SEQ ID NO: 5225 - protein, 21 aa, Torque teno mini virus
TCRYNPLKDTGEGNQVFFKST

SEQ ID NO: 5226 - protein, 21 aa, Torque teno mini virus
TIRYSPNRDTGENNICYFKPI

SEQ ID NO: 5227 - protein, 21 aa, Torque teno mini virus
TTRYNPNRDEGIQNEMYLVNV

SEQ ID NO: 5228 - protein, 21 aa, Torque teno mini virus
QIQYNPDRDTGEDTQLYLLSN

SEQ ID NO: 5229 - protein, 21 aa, Torque teno mini virus
DIRYAPDRDTGVGNKVYLKSV

SEQ ID NO: 5230 - protein, 20 aa, Torque teno midi virus
CRYNPAIDTGKGNTIWLHSN

SEQ ID NO: 5231 - protein, 20 aa, Torque teno midi virus
AIYNPVKDNGDGNMIYLVST

SEQ ID NO: 5232 - protein, 20 aa, Torque teno midi virus
GRYNPAIDDGKGNKIYLQTI

SEQ ID NO: 5233 - protein, 20 aa, Torque teno midi virus
LRYNPHEDTGHGNEIYLTST

SEQ ID NO: 5234 - protein, 20 aa, Torque teno midi virus
LRYNPAADQGPGNIVTIIDL

SEQ ID NO: 5235 - protein, 203 aa, Alphatorquevirus sp.
KIIIRQWQPNYTRRCNIVGYMPLLICGENTVATNYATHSDDSYYPGPFGGGMTTDKFTLRILYDEYKRFMNYWTSSNEDLDLCRYLGCTLYVFRHPEVDFIIIINTSPPFLDTEITGPSIHPGMMALNKRSRWIPSIKNRPGRKHYIKIKVGAPRMFTDKWYPQTDLCDMTLLTIFASAADMQYPFGSPLTDTIVVSFQVLQS

SEQ ID NO: 5236 - protein, 203 aa, Torque teno virus
KIIIRQWQPNYRRRCNIVGYLPILICGGNTVSRNYATHSDDTNYPGPFGGGMTTDKFSLRILYDEYKRFMNYWTASNEDLDLCRYLGCTFYFFRHPEVDFIIKINTMPPFLDTTITAPSIHPGLMALDKRARWIPSLKNRPGKKHYIKIRVGAPKMFTDKWYPQTDLCDMTLLTIYATAADMQYPFGSPLTDTVVVNSQVLQS

SEQ ID NO: 5237 - protein, 203 aa, Torque teno virus
KIIIKQWQPNFIRRCYIIGCLPLVFCGENTTAQNYATHSDDMISKGPYGGGMTTTKFTLRILYDEFTRFMNFWTVSNEDLDLCRYVGCKLIFFKHPTVDFMVQINTQPPFLDTSLTAASIHPGIMMLSKRRILIPSLKTRPSRKHRVVVRVGAPRLFQDKWYPQSDLCDTVLLSIFATARDLQYPFGSPLTDNPCVNFQILGP

SEQ ID NO: 5238 - protein, 203 aa, Torque teno virus
KIIIKQWQPNFIRRCYIIGYLPLIFCGENTTANNFATHSDDMIAKGPWGGGMTTTKFTLRILYDEFTRFMNFWTVSNEDLDLCRYVSCKLIFFKHPTVDFIVRINTEPPFLDTNLTAAQIHPGIMMLSKKHILIPSLKTRPSRKHRVVVRVGPPRLFQDKWYPQSDLCDTVLLSVFATACDLQYPFGSPLTDNPCVNFQILGH

SEQ ID NO: 5239 - protein, 203 aa, Torque teno virus
KLIIKQWQPNFIRHCYIIGYMPLIICGENTFSHNYATHSDDMLSTGPYGGGMTTTKFTLRILFDEYQRHLNFWTVSNQDLDLARYLGTKIIFFRHPTVDFVVQIHTQPPFQDTEITAPSIHPGMLILSKKHILIPSLKTRPSKKHYVKVRVGAPRLFQDKWYPQSELCDVTLLVIYATACDLQYPFGSPQTDNVCVNFQILGQ

SEQ ID NO: 5240 - protein, 204 aa, Torque teno virus
TLILRQWQPDCIRHCKIIGWMPLITCGKGSTQFNYITHADDITPRGASYGGNFTNMTFSLEAIYEQFLYHRNRWSASNHDLELCRYKGTTLKLYRHPEVDYIVTYSRTGPFEISHMTYLSTHPMLMLLNKHHIVVPSLKTKPRGRKAIKVRIRPPKLMNNKWYFTRDFCNIGLFQLWATGLELRNPWLRMSTLSPCIGFNVLKN

SEQ ID NO: 5241 - protein, 204 aa, Torque teno virus
TLMLRQWQPDVIRHCKITGRMPLIICGKGSTQFNYITHADDITPRGASYGGNFTNMTFSLEAIYEQFLYHRNRWSASNHDLELCRYKGTTLKLYRHPDVDYIVTYSRTGPFEISHMTYLSTHPLLMLLNKHHIVVPSLKTKPRGRKAIKVRIRPPKLMNNKWYFTRDFCNIGLFQLWATGLELRNPWLRMSTLSPCIGFNVLKN

SEQ ID NO: 5242 - protein, 203 aa, Torque teno virus
KLMLTQWNPQTVRKCVIRGFLPLFFCGQGAYHRNFTDHYDDVFPKGPSGGGHGSMVFNLSFLYQEFKKHHNKWSRSNLDFDLVRYKGTVIKLYRHQDFDYIVWISRTPPFQESLLTVMTHQPSVMLQAKKCIIVKSYRTHPGGKPYVTAKVRPPRLLTDKWYFQSDFCNVPLFSLQFALAELRFPICSPQTDTNCINFLVLDD

SEQ ID NO: 5243 - protein, 203 aa, Torque teno virus
KLIIKLWQPAVIKRCRIKGYIPLIISGNGTFATNFTSHINDRIMKGPFGGGHSTMRFSLYILFEEHLRHMNFWTRSNDNLELTRYLGASVKIYRHPDQDFIVIYNRRTPLGGNIYTAPSLHPGNAILAKHKILVPSLQTRPKGRKAIRLRIAPPTLFTDKWYFQKDTADLTLFNIMAVEADLRFPFCSPQTDNTCISFQVLSS

SEQ ID NO: 5244 - protein, 204 aa, Alphatorquevirus sp.
RLMLTQWSPQTVRNCSIRGIVPMVICGHTKAGRNYAIHSEDFTTQIQPFGGSFSTTTWSLKVLWDEHQKFQNRWSYPNTQLDLARYRGVTFWFYRDQKTDYIVQWSRNPPFKLNKYSSAMYHPGMMMQAKRKLVVPSFQTRPKGKKRYRVTIKPPNMFADKWYTQEDLCPVPLVQIVVSAASLLHPFCPPQTNNPCITFQVLKD

SEQ ID NO: 5245 - protein, 205 aa, Torque teno virus
KLMLTQWHPNTMRRCLIKGIVPLVICGHTRWNYNYALHSKDYTEEGRYPHGGALSTTTWSLKVLYDEHLKHHDFWGYPNNQLDLARYKGAKFTFYRHKKTDFIIFFNRKPPFKLNKYSCASYHPGMLMQQRHKILLPSYETKPKGRPKITVRIKPPTLLEDKWYTQQDLCDVNLLQLVVTAADFRHPLCSPQTNTPTTTFQVLKD

SEQ ID NO: 5246 - protein, 204 aa, Torque teno virus
RLILRQWQPATRRRCTITGYLPIVFCGHTRGNKNYALHSDDYTPQGQPFGGALSTTSFSLKVLFDQHQRGLNKWSFPNDQLDLARYRGCKFIFYRTKQTDWVGQYDISEPYKLDKYSCPNYHPGNMIKAKHKFLIPSYDTNPRGRQKIIVKIPPPDLFVDKWYTQEDLCSVNLVSLAVSAASFLHPFGSPQTDNPCYTFQVLKE

SEQ ID NO: 5247 - protein, 204 aa, Torque teno virus
KLILTQWNPAIVKRCNIKGGLPIIICGEPRAAFNYGYHMEDYTPQPFPFGGGMSTVTFSLKALYDQYLKHQNRWTFSNDQLDLARYRGCKLRFYRSPVCDFIVHYNLIPPLKMNQFTSPNTHPGLLMLSKHKIIIPSFQTRPGGRRFVKIRLNPPKLFEDKWYTQQDLCKVPLVSITATAADLRYPFCSPQTNNPCTTFQVLRK

SEQ ID NO: 5248 - protein, 203 aa, Torque teno virus
KIMLTQWNPQTTRKCIIRGMMPVLWAGMGTGGRNYAVRSDDYVVNKGFGGSFATETFSLKVLYDQFQRGFNRWSHTNEDLDLARYRGCRWTFYRHKDTDFIVYFTNNPPMKTNQFSAPLTTPGMLMRSKYKVLIPSFQTRPKGRKTVTVKIRPPKLFQDKWYTQQDLCSVPLVQLNVTAADFTHPFGSPLTETPCVEFQVLGD

SEQ ID NO: 5249 - protein, 204 aa, Torque teno mini virus
KLNIKEWQPITIRKTKVKGLYPAFLCNDQRIGNNAIQYLDSIAPHHFPGGGGFGIIQFTLQGLYEQFIKATNWWTQTNCSLPLIRYNFCKLKFYRTANVDYVVKIIRCYPLKATHDLYMQTQPSILMRDKHSILIPCMKNGRNRKTYKTIKVRPPTQMTNGWFFQKDLCNFPLLVILATAASFDRYYTNSKAKSTTIGFISLNT

SEQ ID NO: 5250 - protein, 204 aa, Torque teno mini virus
KIRISEWQPTKIIKSKVKGIYPCFLSNHKRLSNNFVQWIDSTTAHLMPGGGGFGIIQFTLNGLYELFCKAQNWWTKSNCNLPLVRFCGTTLKFWAAENYDYVVHIQRCYPMCCTDLMYMSCQPFIMMMTKNTIFVPCTKNKPRAKRYKKIFVKPPAQMTTQWYFQSQLAKTGLIIIRTAACSLDRIYTSSTASSTTIGLVSLHT

SEQ ID NO: 5251 - protein, 204 aa, Torque teno mini virus
TIRLRQWNPRTTRLCKIKGHIPLIICGRDRQIFNWMQYYDSIGPVEQSGGGGWSSIVFSLGALYQQFKRLMNWWTKDNDGLPLVQYRGCKFKFYKSWDCDYIVTAQTCPPMTDTEYKHLDSHPYRQLMNKRPIIVPNLVRKPSKKTYKIKRFPPPSLLQNKWYFQQDFCATNLLMLTTSAASFDQFWLPNDEISQVITFHSLNT

SEQ ID NO: 5252 - protein, 204 aa, Torque teno mini virus
KIILKQFQPQTIKRVKIKRLECLFHCNAKKIYFNLQMYETSTVPPHLPGGGGWSCKVFTLNALYDAFKHCRNVWTGSNHNLPLVRYMGCKFTLYQSETQDYVFKYQNHYPMVSTIESYNACQPSMLMMDNRTKKIPSKKTKHKRKPYTIVKIRPPAQMQNKWYFTHDTANTPLLLIYSAACSFDNYYISTDSESTNISIPLLRT

SEQ ID NO: 5253 - protein, 204 aa, Torque teno mini virus
TITVKQFQPPNVRKCKIKGLMNLIYFNQKRLIFNSVMYENSLVPEEHPGGGGFSVIKLSLETMYDSHLRCHNWWTTSNEDLPLVRYSGMTVKLYQSKYTDYVFKYQNYLPGTSTYLTYPACQPSMMMMAKNSVIVPSLETKRRRKPYKKIHIKPTSQLQTKWYFQTDLNKTPLAIFYTAACSLTSYYLSPDWESNNISILHLNT

SEQ ID NO: 5254 - protein, 204 aa, Torque teno mini virus
TIPLKQWQPPYKRTCYIKGQDCLIYYSNLRLGMNSTMYEKSIVPVHWPGGGSFSVSMLTLDALYDIHKLCRNWWTSTNQDLPLVRYKGCKITFYQSTFTDYIVRIHTELPANSNKLTYPNTHPLMMMMSKYKHIIPSRQTRRKKKPYTKIFVKPPPQFENKWYFATDLYKIPLLQIHCTACNLQNPFVKPDKLSNNVTLWSLNT

SEQ ID NO: 5255 - protein, 204 aa, Torque teno mini virus
KLTLKEWQPKTIRKSCIKGLHCLFIVTEDTISRNYRMYEHSFTGEHWPSGGGFSVTKYTLDGLYEQHQLDRNWWTKPNTNMPLVRYLGCKITFYQSWEVDYVCNINLTWPMVATNLLYLSCHPNFMMMNHKAIFVPSKITKRLRRGKKTVRLRPPHQMINKWYFAKELAKTGLVMLTAAAASFDHYYIGSDKLSNNCTFTSLNP

SEQ ID NO: 5256 - protein, 204 aa, Torque teno midi virus
KIPIYQWQPDSIRKCKIKGVGTLVLGAHGKQFVCYTDVETRAPPPKAPGGGGFGCKQFSLQYLYEEYRFRNNIWTHTNINLDLVRYLRAAFTFYRHPDIDFIINYDRQPPFYLDKFTYPLCHPQNLLLGKHKIILLSKASKPNGKVKKRIIIKPPKQMITKWFFQEQFTTQPLLSLRAAAASFQYPHIGCCMPNRVVTFSALNP

SEQ ID NO: 5257 - protein, 204 aa, Torque teno midi virus
SLIVRQWQPDSIRTCKIIGQSAIVVGAEGKQMYCYTVNKLINVPPKTPYGGGFGVDQYTLKYLYEEYRFAQNIWTQSNVLKDLCRYINVKLIFYRDNKTDFVLSYDRNPPFQLTKFTYPGAHPQQIMLQKHHKFILSQMTKPNGRLTKKLKIKPPKQMLSKWFFSKQFCKYPLLSLKASALDLRHSYLGCCNENPQVFFYYLNH

SEQ ID NO: 5258 - protein, 204 aa, Torque teno midi virus
TLIVRQWQPDSIVLCKIKGYDSIIWGAEGTQFQCSTHEMYEYTRQKYPGGGGFGVQLYSLEYLYDQWKLRNNIWTKTNQLKDLCRYLKCVMTFYRHQHIDFVIVYERQPPFEIDKLTYMKYHPYMLLQRKHKIILPSQTTNPRGKLKKKKTIKPPKQMLSKWFFQQQFAKYDLLLIAAAACSLRYPRIGCCNENRMITLYCLNT

SEQ ID NO: 5259 - protein, 204 aa, Torque teno midi virus
KITIKQWQPDSVKKCKIKGYSTLVMGAQGKQYNCYTNQASDYVQPKAPQGGGFGCEVFNLKWLYQEYTAHRNIWTKTNEYTDLCRYTGAQIILYRHPDVDFIVSWDNQPPFLLNKYTYPELQPQNLLLARRKRIILSQKSNPKGKLRIKLRIPPPKQMITKWFFQRDFCDVNLFKLCASAASFRYPGISHGAQSTIFSAYALNT

SEQ ID NO: 5260 - protein, 204 aa, Torque teno midi virus
FLKLVQWQPDRIRKCTIKGRGTLVMGAHGRQMICFTNVKDRLTPSRAPAGGGFGVERITLAHLYEEWKARNNVWTATNENTDLGRYTGCKISFYRHLDTDFIIKYSRNPPFNLEKYSYMYMQPQELLLGKHKRILLSKKTNPKGKLKTTLKIGPPKLLTNKWLLQSELAKQDLVEISAAAASFTYPTIGCCNENRILNLYSINT
